(19) United States
(12) Patent Application Publication
(10) Pub. No.: US 2026/0098075 A1
(43) Pub. Date: Apr. 9, 2026

(54) CHIMERIC ANTIGEN RECEPTOR SPACERS

(71) Applicant: Lyell Immunopharma, Inc., South San Francisco, CA (US)

(72) Inventors: Marc Joseph LAJOIE, Seattle, WA (US); Brian Douglas WEITZNER, Seattle, WA (US); Scott Edward BOYKEN, Seattle, WA (US); Spencer PARK, Seattle, WA (US); Yun SONG, Seattle, WA (US)

(73) Assignee: Lyell Immunopharma, Inc., South San Francisco, CA (US)

(21) Appl. No.: 19/322,325

(22) Filed: Sep. 8, 2025

Related U.S. Application Data
(63) Continuation of application No. 17/318,996, filed on May 12, 2021, now abandoned.
(60) Provisional application No. 63/023,751, filed on May 12, 2020.

(51) Int. Cl. C07K 14/725; A61K 38/00; A61K 39/00; A61K 40/11; A61K 40/31; A61K 40/42; A61P 35/00; C07K 7/06; C07K 16/30; C12N 5/0783

(52) U.S. Cl. CPC C07K 14/7051; A61K 40/11; A61K 40/31; A61K 40/4205; A61K 40/421; A61K 40/4211; A61P 35/00; C07K 7/06; C07K 16/30; C12N 5/0636; A61K 38/00; A61K 2039/505; C07K 2317/53; C07K 2319/03

(57) ABSTRACT

The present disclosure related to chimeric antigen receptors (CARs) comprising immunoglobulin (Ig) derived spacers, e.g., hinge or loop regions, fragments thereof, or combinations thereof. Ig derived spacer confers improved properties to the CARs, e.g., increased cytokine release with respect the CARs with spacers not derived from hinge regions and fragments thereof, loop regions from constant domains and fragments thereof, and combinations thereof. Also provided are cells expressing CARs comprising Ig derived spacers regions and methods to use the CARs to treat diseases or disorders, e.g., cancer. Some of the disclosed Ig derived spacers are fragments from, e.g., IgAQ1, IgA2, IgD, IgE, IgG1, IgG2, IgG3, IgG4, or IgM. In some aspects, the disclosed Ig derived spacers are derived from non-human immunoglobulins, e.g., mouse immunoglobulins such IgG2A. Other Ig derived spacer disclosed are modular constructs comprising several concatenated Ig hinges or fragments thereof.

### CROSS-REFERENCE TO RELATED APPLICATIONS

[0001] This application is a continuation of U.S. Nonprovisional application Ser. No. 17/318,996, filed on May 12, 2021, which claims the priority benefit of U.S. Provisional Application No. 63/023,751, filed on May 12, 2020, which is herein incorporated by reference in its entirety.

### REFERENCE TO SEQUENCE LISTING SUBMITTED ELECTRONICALLY

[0002] The content of the electronically submitted sequence listing in ASCII text file (Name: 4385_0160003_Seqlisting_ST26; Size: 6,501,713 bytes; and Date of Creation: Aug. 29, 2025) filed with the application is herein incorporated by reference in its entirety.

### TECHNICAL FIELD

[0003] The present disclosure provides chimeric antigen receptors (CAR) comprising a spacer derived from immunoglobulin hinge or constant regions.

### BACKGROUND ART

[0004] Adoptive immunotherapy using chimeric antigen receptor (CAR) expressing T cells is a promising cancer treatment, because these cells can directly recognize and kill antigen-expressing tumor cells in a human leukocyte antigen (HLA)-independent manner. However, besides a careful choice of the target tumor associated antigen, this therapeutic approach is highly dependent on the optimal molecular design of the CAR.

[0005] Accordingly, there is a need for methodologies that allow the systematic optimization of the extracellular spacer in CARs to allow for maximum CAR T cell efficacy.

### BRIEF SUMMARY

[0006] The present disclosure provides a polynucleotide encoding a CAR comprising (i) an antigen-binding domain that binds to an epitope on a tumor antigen expressed on a target cell; (ii) a transmembrane domain; (iii) an intracellular domain; and, (iv) a CAR spacer located between the antigen-binding domain and the transmembrane domain comprising an amino acid sequence derived from a human immunoglobulin hinge and/or constant region or a functional fragment thereof, wherein (a) the spacer is between about 150 amino acids and about 125 amino acids in length; and, the distance between the epitope and the surface of the target cell membrane is less than about 10 Å; (b) the spacer is between about 125 amino acids and about 100 amino acids in length; and, the distance between the epitope and the surface of the target cell membrane is less than about 10 Å; (c) the spacer is between about 100 amino acids and about 75 amino acids in length; and, the distance between the epitope and the surface of the target cell membrane is less than about 10 Å; (d) the spacer is between about 75 amino acids and about 36 amino acids in length; and, the distance between the epitope and the surface of the target cell membrane is less than about 15 Å; (e) the spacer is between about 35 amino acids and about 21 amino acids in length; and, the distance between the epitope and the surface of the target cell membrane is between about 15 Å and about 25 Å; (f) the spacer is between about 20 amino acids and about 16 amino acids in length; and, the distance between the epitope and the surface of the target cell membrane is between about 25 Å and about 35 Å; (g) the spacer is between about 15 amino acids and about 11 amino acids in length; and, the distance between the epitope and the surface of the target cell membrane is between about 35 Å and about 45 Å; or, (h) the spacer is between about 10 amino acids and about 5 amino acids in length; and, the distance between the epitope and the surface of the target cell membrane is more than about 45 Å.

[0007] The present disclosure also provides a polynucleotide encoding a CAR comprising (i) an antigen-binding domain that binds to an epitope on a tumor antigen expressed on a target cell; (ii) a transmembrane domain; (iii) an intracellular domain; and, (iv) a CAR spacer located between the antigen-binding domain and the transmembrane domain comprising an amino acid sequence derived from a human immunoglobulin hinge and/or constant region or a functional fragment thereof, wherein (a) the spacer is between about 450 Å and about 375 Å in length; and, the distance between the epitope and the surface of the target cell membrane is less than about 10 Å; (b) the spacer is between about 375 Å and about 300 Å in length; and, the distance between the epitope and the surface of the target cell membrane is less than about 10 Å; (c) the spacer is between about 300 Å and about 225 Å in length; and, the distance between the epitope and the surface of the target cell membrane is less than about 10 Å; (d) the spacer is between about 225 Å and about 100 Å in length; and, the distance between the epitope and the surface of the target cell membrane is less than about 15 Å; (e) the spacer is between about 100 Å and about 60 Å in length; and, the distance between the epitope and the surface of the target cell membrane is between about 15 Å and about 25 Å; (f) the spacer is between about 60 Å and about 45 Å in length; and, the distance between the epitope and the surface of the target cell membrane is between about 25 Å and about 35 Å; (g) the spacer is between about 45 Å and about 30 Å in length; and, the distance between the epitope and the surface of the target cell membrane is between about 35 Å and about 45 Å; or, (h) the spacer is between about 30 Å and about 15 Å in length; and, the distance between the epitope and the surface of the target cell membrane is more than about 45 Å.

[0008] In some aspects, (a) the distance between the epitope and the surface of the target cell membrane is less than about 10 Å and the spacer is 125, 126, 127, 128, 129, 130, 131, 132, 133, 134, 135, 136, 137, 138, 139, 140, 141, 142, 143, 144, 145, 146, 147, 148, 149 or 150 amino acids in length; (b) the distance between the epitope and the surface of the target cell membrane is less than about 10 Å and the spacer is 100, 101, 102, 103, 104, 105, 106, 107, 108, 109, 110, 111, 112, 113, 114, 115, 116, 117, 118, 119, 120, 121, 122, 123, 124 or 125 amino acids amino acids in length; (c) the distance between the epitope and the surface of the target cell membrane is less than about 10 Å and the spacer is 75, 76, 77, 78, 79, 80, 81, 82, 83, 84, 85, 86, 87, 88, 89, 90, 91, 92, 93, 94, 95, 96, 97, 98, 99 or 100 amino acids in length; (d) the distance between the epitope and the surface of the target cell membrane is less than about 15 Å and the spacer is 36, 37, 38, 39, 40, 41, 42, 43, 44, 45, 46, 47, 48, 49, 50, 51, 52, 53, 54, 55, 56, 57, 58, 59, 60, 61, 62, 63, 64, 65, 66, 67, 68, 69, 70, 71, 72, 73, 74 or 75 amino acids in length; (e) the distance between the epitope and the surface of the target cell membrane is between about 15 Å and about 25 Å and the spacer is 21, 22, 23, 24, 25, 26, 27, 28, 29, 30, 31, 32, 33, 34 or 35 amino acids in length; (f) the distance between the epitope and the surface of the target cell membrane is between about 25 Å and about 35 Å and the spacer is 16, 17, 18, 19 or 20 amino acids in length; (g) the distance between the epitope and the surface of the target cell membrane is between about 35 Å and about 45 Å and the spacer is 11, 12, 13, 14, or 15 amino acids in length; or, (h) the distance between the epitope and the surface of the target cell membrane is more than about 45 Å and the spacer is 5, 6, 7, 8, 9 or 10 amino acids in length.

[0009] In some aspects, (a) the distance between the epitope and the surface of the target cell membrane is less than about 10 Å and the spacer is about 450 Å, about 440 Å, about 430 Å, about 420 Å, about 410 Å, about 400 Å, about 390 Å, about 380 Å or about 375 Å in length; (b) the distance between the epitope and the surface of the target cell membrane is less than about 10 Å and the spacer is about 375 Å, about 370 Å, about 360 Å, about 350 Å, about 340 Å, about 330 Å, about 320 Å, about 310 Å, or about 300 Å in length; (c) the distance between the epitope and the surface of the target cell membrane is less than about 10 Å and the spacer is about 300 Å, about 290 Å, about 280 Å, about 270 Å, about 260 Å, about 250 Å, about 240 Å, about 230 Å, or about 225 Å in length; (d) the distance between the epitope and the surface of the target cell membrane is less than about 15 Å the spacer is about 225 Å, about 220 Å, about 210 Å, about 200 Å, about 190 Å, about 180 Å, about 170 Å, about 160 Å, about 150 Å, about 140 Å, about 130 Å, about 120 Å, about 110 Å, or about 100 Å in length; (e) the distance between the epitope and the surface of the target cell membrane is between about 15 Å and about 25 Å and the spacer is about 100 Å, about 95 Å, about 90 Å, about 85 Å, about 80 Å, about 75 Å, about 70 Å, about 65 Å, or about 60 Å in length; (f) the distance between the epitope and the surface of the target cell membrane is between about 25 Å and about 35 Å and the spacer is about 60 Å, about 55 Å, about 50 Å, and about 45 Å in length; (g) the distance between the epitope and the surface of the target cell membrane is between about 35 Å and about 45 Å and the spacer is about 45 Å, about 40 Å, about 35 Å, or about 30 Å in length; or, (h) the distance between the epitope and the surface of the target cell membrane is more than about 45 Å and the spacer is about 30 Å, about 25 Å, about 20 Å, or about 15 Å in length.

[0010] The present disclosure also provides a polynucleotide encoding a CAR comprising (i) an antigen-binding domain that binds to an epitope on a tumor antigen expressed on a target cell; (ii) a transmembrane domain; (iii) an intracellular domain; and, (iv) a CAR spacer located between the antigen-binding domain and the transmembrane domain comprising an amino acid sequence derived from a human immunoglobulin hinge and/or constant region or a functional fragment thereof, wherein the spacer comprises an amino acid sequence of formula CN—(X₁PRX₂P)ₘ-[L-(X₁PRX₂P)]ₙ—C_{C} wherein: (a) the spacer is located between the ligand-binding domain and the transmembrane domain of the CAR; (b) the spacer has a length of at least 15 amino acids; (c) m is an integer selected from 0 or 1; (d) n is an integer between 1 to 20; (e) L is a linker polypeptide sequence; (f) CN is an optional N-terminal capping sequence; (g) Cc is an optional C-terminal capping sequence; and, (h) X₁ and X₂ are independently selected from cysteine, glycine, alanine, or serine.

[0011] In some aspects, the spacer comprises two, three, four, five, or six X₁PRX₂P motifs. In some aspects, X₁PRX₂P comprises at least one cysteine. In some aspects, X₁PRX₂P is SEQ ID NO:4749. In some aspects, the L comprises a polypeptide of SEQ ID NO: 4223 or a fragment or variant thereof. In some aspects, when n>1, all L are identical. In some aspects, when n>1, at least one L is different from the other L. In some aspects, the CN comprises a polypeptide of SEQ ID NO: 4088 or a fragment or variant thereof.

[0012] In some aspects, the Cc comprises a polypeptide of SEQ ID NO: 4533 or a fragment or variant thereof. In some aspects, the CAR spacer comprises the sequence of formula (CPRCP)ₒ(EPKSCDTPPPCPRCP)ₚ, wherein o is an integer which is 0 or 1, and p is an integer which is 1, 2 or 3, wherein CPRCP is the sequence set forth in SEQ ID NO:4740, and wherein EPKSCDTPPPCPRCP is the sequence set forth in SEQ ID NO: 4477.

[0013] In some aspects, the CAR spacer comprises an amino acid sequence at least about 70%, at least about 75%, at least about 80%, at least about 85%, at least about 90%, at least about 95%, at least about 96%, at least about 97%, at least about 98%, at least about 99%, or about 100% sequence identity to a sequence selected the group consisting of SEQ ID NOS: 2813, 2903, 2983, 3358, 3728, and 4477.

[0014] In some aspects, the CAR spacer comprises a Cc capping sequence comprising a subsequence of the polypeptide of SEQ ID NO: 4533 or a fragment or variant thereof. In some aspects, the subsequence of the polypeptide of SEQ ID NO: 5 is the N-terminal AP. In some aspects, the CAR spacer comprises an amino acid sequence at least about 70%, at least about 75%, at least about 80%, at least about 85%, at least about 90%, at least about 95%, at least about 96%, at least about 97%, at least about 98%, at least about 99%, or about 100% sequence identity to a sequence selected from the group consisting of SEQ ID NOS 4833, 4834, 4835, 4836, 4837, and 4838.

[0015] In some aspects, the CAR spacer comprises a C_{N} capping sequence comprising a subsequence of the polypeptide of SEQ ID NO:4088 or a fragment or variant thereof. In some aspects, the CAR spacer comprises an amino acid sequence at least about 70%, at least about 75%, at least about 80%, at least about 85%, at least about 90%, at least about 95%, at least about 96%, at least about 97%, at least about 98%, at least about 99%, or about 100% sequence identity to the amino acid sequence of SEQ ID NO: 4833.

[0016] The present disclosure also provides a polynucleotide encoding a CAR comprising (i) an antigen-binding domain that binds to an epitope on a tumor antigen expressed on a target cell; (ii) a transmembrane domain; (iii) an intracellular domain; and, (iv) a CAR spacer located between the antigen-binding domain and the transmembrane domain comprising an amino acid sequence derived from a human immunoglobulin hinge region or a functional fragment thereof, wherein the spacer comprises an amino acid sequence of SEQ ID NO: 4841.

[0017] The disclosure also provides a polynucleotide encoding a CAR comprising (i) an antigen-binding domain that binds to an epitope on a tumor antigen expressed on a target cell; (ii) a transmembrane domain; (iii) an intracellular domain; and, (iv) a CAR spacer located between the antigen-binding domain and the transmembrane domain comprising an amino acid sequence derived from a human immunoglobulin hinge region or a functional fragment thereof, wherein the spacer comprises an amino acid sequence at least about 70%, at least about 75%, at least about 80%, at least about 85%, at least about 90%, at least about 95%, at least about 96%, at least about 97%, at least about 98%, at least about 99%, or about 100% sequence identity to SEQ ID NO: 4839.

[0018] Also provided is a polynucleotide encoding a CAR comprising (i) an antigen-binding domain that binds to an epitope on a tumor antigen expressed on a target cell; (ii) a transmembrane domain; (iii) an intracellular domain; and, (iv) a CAR spacer located between the antigen-binding domain and the transmembrane domain comprising an amino acid sequence derived from a human immunoglobulin hinge region or a functional fragment thereof, wherein the spacer comprises an amino acid sequence of formula (EX₃KX₄X₅X₆X₇DTX₈X₉X₁₀TCPRCP)q, wherein q is an integer between 1 and 10, and wherein: X₃ is L or P; X₄ is T or S; X₅ is P or C; X₆ is L, or none; X₇ is G, or none; X₈ is T or P; X₉ is H or P; and, X₁₀ is T or P.

[0019] Also provided is a polynucleotide encoding a CAR comprising (i) an antigen-binding domain that binds to an epitope on a tumor antigen expressed on a target cell; (ii) a transmembrane domain; (iii) an intracellular domain; and, (iv) a CAR spacer located between the antigen-binding domain and the transmembrane domain comprising an amino acid sequence derived from a human immunoglobulin hinge region or a functional fragment thereof, wherein the spacer comprises at least one amino sequence A of SEQ ID NO: 4466 and/or at least one amino acid sequence B of SEQ ID NO: 4477, wherein the amino acid sequence of the CAR spacer corresponds to the formula A, B, AB, ABB, ABBB, ABBBB, ABBBBB, AA, AAA, AAAA, AAAAA, BB, BBB, BBBB, or BBBBB.

[0020] The present disclosure also provides a polynucleotide encoding a CAR comprising (i) an antigen-binding domain that binds to an epitope on a tumor antigen expressed on a target cell; (ii) a transmembrane domain; (iii) an intracellular domain; and, (iv) a CAR spacer located between the antigen-binding domain and the transmembrane domain comprising an amino acid sequence derived from a human immunoglobulin hinge and/or constant region or a functional fragment thereof, wherein the spacer comprises an amino acid sequence selected from the sequences in TABLE 11 or at least about 70%, at least about 75%, at least about 80%, at least about 85%, at least about 90%, at least about 95%, at least about 96%, at least about 97%, at least about 98%, at least about 99%, or about 100% sequence identity to a sequence in TABLE 11.

[0021] In some aspects, the spacer further comprises an N-terminal subsequence comprising 1, 2, 3, 4, or 5 IgG3 CH1 C-terminal domain amino acids and/or a C-terminal subsequence comprising 1, 2, 3, 4, or 5 IgG3 CH2 N-terminal domain amino acids. In some aspects, the N-terminal subsequence comprising 1, 2, 3, 4, or 5 IgG3 CH1 C-terminal domain amino acids and/or C-terminal subsequence comprising 1, 2, 3, 4, or 5 IgG3 CH2 N-terminal domain amino acids comprises an amino acid sequence selected from the sequences in TABLE 12.

[0022] The present disclosure also provides a polynucleotide encoding a CAR comprising (i) an antigen-binding domain that binds to an epitope on a tumor antigen expressed on a target cell; (ii) a transmembrane domain; (iii) an intracellular domain; and, (iv) a CAR spacer located between the antigen-binding domain and the transmembrane domain comprising an amino acid sequence derived from a human immunoglobulin hinge and/or constant region or a functional fragment thereof, wherein the spacer comprises an amino acid sequence comprising at least five, six, or seven consecutive amino acids SEQ ID NO: 1.

[0023] In some aspects, the spacer comprises an amino acid sequence at least about 70%, at least about 75%, at least about 80%, at least about 85%, at least about 90%, at least about 95%, at least about 96%, at least about 97%, at least about 98%, at least about 99%, or about 100% sequence identity to a sequence selected from the group consisting of SEQ ID NOS: 2015, 1889, 1768, 4852, and any combination thereof.

[0024] The present disclosure also provides a polynucleotide encoding a CAR comprising (i) an antigen-binding domain that binds to an epitope on a tumor antigen expressed on a target cell; (ii) a transmembrane domain; (iii) an intracellular domain; and, (iv) a CAR spacer located between the antigen-binding domain and the transmembrane domain comprising an amino acid sequence derived from a human immunoglobulin hinge and/or constant region or a functional fragment thereof, wherein the spacer comprises an amino acid sequence selected from the sequences in TABLE 1 or at least about 70%, at least about 75%, at least about 80%, at least about 85%, at least about 90%, at least about 95%, at least about 96%, at least about 97%, at least about 98%, at least about 99%, or about 100% sequence identity to a sequence in TABLE 1.

[0025] In some aspects, the CAR spacer further comprises (i) an N-terminal subsequence comprising 1, 2, 3, 4, or 5 IgD CH1 C-terminal domain amino acids and/or (ii) a C-terminal subsequence comprising 1, 2, 3, 4, or 5 IgD CH2 N-terminal domain amino acids. In some aspects, the IgD CH1 and CH2 sequence C-terminal domain amino acids and/or IgD CH1 and CH2 sequence N-terminal domain amino acids comprise an amino acid sequence selected from the sequences in TABLE 2.

[0026] The present disclosure also provides a polynucleotide encoding a CAR comprising (i) an antigen-binding domain that binds to an epitope on a tumor antigen expressed on a target cell; (ii) a transmembrane domain; (iii) an intracellular domain; and, (iv) a CAR spacer located between the antigen-binding domain and the transmembrane domain comprising an amino acid sequence derived from a human immunoglobulin hinge and/or constant region or a functional fragment thereof, wherein the spacer comprises an amino acid sequence comprising at least five, six, or seven consecutive amino acids of SEQ ID NO: 2560.

[0027] In some aspects, the spacer comprises an amino acid sequence selected from the sequences in TABLE 3 or at least about 70%, at least about 75%, at least about 80%, at least about 85%, at least about 90%, at least about 95%, at least about 96%, at least about 97%, at least about 98%, at least about 99%, or about 100% sequence identity to a sequence in TABLE 3. In some aspects, the spacer comprises an amino acid sequence at least about 70%, at least about 75%, at least about 80%, at least about 85%, at least about 90%, at least about 95%, at least about 96%, at least about 97%, at least about 98%, at least about 99%, or about 100% sequence identity to a sequence selected from the group consisting of SEQ ID NOS: 4847, 4845, 4846, 2560, 4844, and any combination thereof.

[0028] In some aspects, the spacer further comprises an N-terminal subsequence comprising 1, 2, 3, 4, or 5 IgAQ1 CH1 C-terminal domain amino acids and/or a C-terminal subsequence comprising 1, 2, 3, 4, or 5 IgAQ1 CH2 N-terminal domain amino acids. In some aspects, the N-terminal subsequence comprising 1, 2, 3, 4, or 5 IgAQ1 CH1 C-terminal domain amino acids and/or C-terminal subsequence comprising 1, 2, 3, 4, or 5 IgAQ1 CH2 N-terminal domain amino acids comprises an amino acid sequence selected from the sequences in TABLE 4.

[0029] The present disclosure provides polynucleotide encoding a CAR comprising (i) an antigen-binding domain that binds to an epitope on a tumor antigen expressed on a target cell; (ii) a transmembrane domain; (iii) an intracellular domain; and, (iv) a CAR spacer located between the antigen-binding domain and the transmembrane domain comprising an amino acid sequence derived from a human immunoglobulin hinge and/or constant region or a functional fragment thereof, wherein the spacer comprises an amino acid sequence comprising at least five, six, or seven consecutive amino acids of SEQ ID NO: 4848.

[0030] In some aspects, the spacer comprises an amino acid sequence at least about 70%, at least about 75%, at least about 80%, at least about 85%, at least about 90%, at least about 95%, at least about 96%, at least about 97%, at least about 98%, at least about 99%, or about 100% sequence identity to a sequence selected from the group consisting of SEQ ID NOS: 4523, 4850, 2713, 4524, 4525, and any combination thereof.

[0031] In some aspects, the spacer comprises an amino acid sequence selected from the sequences in TABLE 5 or at least about 70%, at least about 75%, at least about 80%, at least about 85%, at least about 90%, at least about 95%, at least about 96%, at least about 97%, at least about 98%, at least about 99%, or about 100% sequence identity to a sequence in TABLE 5. In some aspects, the spacer further comprises an N-terminal subsequence comprising 1, 2, 3, 4, or 5 IgA2 CH1 C-terminal domain amino acids and/or a C-terminal subsequence comprising 1, 2, 3, 4, or 5 IgA2 CH2 N-terminal domain amino acids. In some aspects, the N-terminal subsequence comprising 1, 2, 3, 4, or 5 IgA2 CH1 C-terminal domain amino acids and/or C-terminal subsequence comprising 1, 2, 3, 4, or 5 IgA2 CH2 N-terminal domain amino acids comprises an amino acid sequence selected from the sequences in TABLE 6.

[0032] The present disclosure also provides a polynucleotide encoding a CAR comprising (i) an antigen-binding domain that binds to an epitope on a tumor antigen expressed on a target cell; (ii) a transmembrane domain; (iii) an intracellular domain; and, (iv) a CAR spacer located between the antigen-binding domain and the transmembrane domain comprising an amino acid sequence derived from a human immunoglobulin hinge and/or constant region or a functional fragment thereof, wherein the spacer comprises an amino acid sequence comprising at least five, six, or seven consecutive amino acids of SEQ ID NO: 2723 or SEQ ID NO: 4843.

[0033] In some aspects, the spacer comprises an amino acid sequence at least about 70%, at least about 75%, at least about 80%, at least about 85%, at least about 90%, at least about 95%, at least about 96%, at least about 97%, at least about 98%, at least about 99%, or about 100% sequence identity to a sequence selected from the group consisting of SEQ ID NOS: 4839, 4840, 4843, and any combination thereof. In some aspects, the spacer comprises an amino acid sequence selected from the sequences in TABLE 7 or at least about 70%, at least about 75%, at least about 80%, at least about 85%, at least about 90%, at least about 95%, at least about 96%, at least about 97%, at least about 98%, at least about 99%, or about 100% sequence identity to a sequence in TABLE 7. In some aspects, the spacer further comprises an N-terminal subsequence comprising 1, 2, 3, 4, or 5 IgG1 CH1 C-terminal domain amino acids and/or a C-terminal subsequence comprising 1, 2, 3, 4, or 5 IgG1 CH2 N-terminal domain amino acids. In some aspects, the N-terminal subsequence comprising 1, 2, 3, 4, or 5 IgG1 CH1 C-terminal domain amino acids and/or C-terminal subsequence comprising 1, 2, 3, 4, or 5 IgG1 CH2 N-terminal domain amino acids comprises an amino acid sequence selected from the sequences in TABLE 8.

[0034] The present disclosure also provides a polynucleotide encoding a CAR comprising (i) an antigen-binding domain that binds to an epitope on a tumor antigen expressed on a target cell; (ii) a transmembrane domain; (iii) an intracellular domain; and, (iv) a CAR spacer located between the antigen-binding domain and the transmembrane domain comprising an amino acid sequence derived from a human immunoglobulin hinge and/or constant region or a functional fragment thereof, wherein the spacer comprises an amino acid sequence comprising at least five, six, or seven consecutive amino acids of SEQ ID NO: 2768 or SEQ ID NO: 4842.

[0035] In some aspects, the spacer comprises an amino acid sequence at least about 70%, at least about 75%, at least about 80%, at least about 85%, at least about 90%, at least about 95%, at least about 96%, at least about 97%, at least about 98%, at least about 99%, or about 100% sequence identity to SEQ ID NO: 4842. In some aspects, the spacer comprises an amino acid sequence selected from the sequences in TABLE 9A or at least about 70%, at least about 75%, at least about 80%, at least about 85%, at least about 90%, at least about 95%, at least about 96%, at least about 97%, at least about 98%, at least about 99%, or about 100% sequence identity to a sequence in TABLE 9A. In some aspects, the spacer further comprises an N-terminal subsequence comprising 1, 2, 3, 4, or 5 IgG2 CH1 C-terminal domain amino acids and/or a C-terminal subsequence comprising 1, 2, 3, 4, or 5 IgG2 CH2 N-terminal domain amino acids. In some aspects, the N-terminal subsequence comprising 1, 2, 3, 4, or 5 IgG2 CH1 C-terminal domain amino acids and/or C-terminal subsequence comprising 1, 2, 3, 4, or 5 IgG2 CH2 N-terminal domain amino acids comprises an amino acid sequence selected from the sequences in TABLE 10A.

[0036] In some aspects, the present disclosure provides a polynucleotide encoding a CAR comprising (i) an antigen-binding domain that binds to an epitope on a tumor antigen expressed on a target cell; (ii) a transmembrane domain; (iii) an intracellular domain; and, (iv) a CAR spacer located between the antigen-binding domain and the transmembrane domain comprising an amino acid sequence derived from a human immunoglobulin hinge and/or constant region or a functional fragment thereof, wherein the spacer comprises an amino acid sequence comprising at least five, six, or seven consecutive amino acids of SEQ ID NO: 4926.

[0037] In some aspects, the spacer comprises an amino acid sequence at least about 70%, at least about 75%, at least about 80%, at least about 85%, at least about 90%, at least about 95%, at least about 96%, at least about 97%, at least about 98%, at least about 99%, or about 100% sequence identity to a sequence selected from the group consisting of SEQ ID NOS: 4830, 4831, 4832, and any combination thereof.

[0038] In some aspects, the spacer comprises an amino acid sequence selected from the sequences in TABLE 9B or at least about 70%, at least about 75%, at least about 80%, at least about 85%, at least about 90%, at least about 95%, at least about 96%, at least about 97%, at least about 98%, at least about 99%, or about 100% sequence identity to a sequence in TABLE 9B. In some aspects, the spacer further comprises an N-terminal subsequence comprising 1, 2, 3, 4, or 5 IgG2 CH1 C-terminal domain amino acids and/or a C-terminal subsequence comprising 1, 2, 3, 4, or 5 IgG2 CH2 N-terminal domain amino acids. In some aspects, the N-terminal subsequence comprising 1, 2, 3, 4, or 5 IgG2 CH1 C-terminal domain amino acids and/or C-terminal subsequence comprising 1, 2, 3, 4, or 5 IgG2 CH2 N-terminal domain amino acids comprises an amino acid sequence selected from the sequences in TABLE 10B.

[0039] The present disclosure also provides a polynucleotide encoding a CAR comprising (i) an antigen-binding domain that binds to an epitope on a tumor antigen expressed on a target cell; (ii) a transmembrane domain; (iii) an intracellular domain; and, (iv) a CAR spacer located between the antigen-binding domain and the transmembrane domain comprising an amino acid sequence derived from a human immunoglobulin hinge and/or constant region or a functional fragment thereof, wherein the spacer comprises an amino acid sequence comprising at least five, six, or seven consecutive amino acids of SEQ ID NO: 4374.

[0040] In some aspects, the spacer comprises an amino acid sequence at least about 70%, at least about 75%, at least about 80%, at least about 85%, at least about 90%, at least about 95%, at least about 96%, at least about 97%, at least about 98%, at least about 99%, or about 100% sequence identity to SEQ ID NO: 4856. In some aspects, the spacer comprises an amino acid sequence selected from the sequences in TABLE 15 or at least about 70%, at least about 75%, at least about 80%, at least about 85%, at least about 90%, at least about 95%, at least about 96%, at least about 97%, at least about 98%, at least about 99%, or about 100% sequence identity to a sequence in TABLE 15. In some aspects, the spacer further comprises an N-terminal subsequence comprising 1, 2, 3, 4, or 5 IgE CH1 C-terminal domain amino acids and/or a C-terminal subsequence comprising 1, 2, 3, 4, or 5 IgE CH2 N-terminal domain amino acids. In some aspects, the N-terminal subsequence comprising 1, 2, 3, 4, or 5 IgE CH1 C-terminal domain amino acids and/or C-terminal subsequence comprising 1, 2, 3, 4, or 5 IgE CH2 N-terminal domain amino acids comprises an amino acid sequence selected from the sequences in TABLE 16.

[0041] The present disclosure also provides a polynucleotide encoding a CAR comprising (i) an antigen-binding domain that binds to an epitope on a tumor antigen expressed on a target cell; (ii) a transmembrane domain; (iii) an intracellular domain; and, (iv) a CAR spacer located between the antigen-binding domain and the transmembrane domain comprising an amino acid sequence derived from a human immunoglobulin hinge and/or constant region or a functional fragment thereof, wherein the spacer comprises an amino acid sequence comprising at least five, six, or seven consecutive amino acids of SEQ ID NO: 4857.

[0042] In some aspects, the spacer comprises an amino acid sequence at least about 70%, at least about 75%, at least about 80%, at least about 85%, at least about 90%, at least about 95%, at least about 96%, at least about 97%, at least about 98%, at least about 99%, or about 100% sequence identity to amino acid sequence of SEQ ID NOS 4858, 4959, 4857, and any combination thereof.

[0043] In some aspects, the spacer comprises an amino acid sequence selected from the sequences in TABLE 17 or at least about 70%, at least about 75%, at least about 80%, at least about 85%, at least about 90%, at least about 95%, at least about 96%, at least about 97%, at least about 98%, at least about 99%, or about 100% sequence identity to a sequence in TABLE 17. In some aspects, the spacer further comprises an N-terminal subsequence comprising 1, 2, 3, 4, or 5 IgM CH1 C-terminal domain amino acids and/or a C-terminal subsequence comprising 1, 2, 3, 4, or 5 IgM CH2 N-terminal domain amino acids. In some aspects, the N-terminal subsequence comprising 1, 2, 3, 4, or 5 IgM CH1 C-terminal domain amino acids and/or C-terminal subsequence comprising 1, 2, 3, 4, or 5 IgM CH2 N-terminal domain amino acids comprises an amino acid sequence selected from the sequences in TABLE 18. In some aspects, the CAR spacer comprises an optional L1 linker and/or an optional L2 linker. In some aspects, an optional L1 linker and/or an optional L2 linker is a flexible linker. In some aspects, the optional L1 linker and/or an optional L2 linker is between 1 and 100 amino acids in length. In some aspects, the L1 linker is between 1 and 10 amino acids in length. In some aspects, the L1 linker comprises a Gly-Ser linker. In some aspects, the L1 linker comprises the sequence set forth in SEQ ID NO: 4818. In some aspects, the L2 linker is between 1 and 10 amino acids in length. In some aspects, the L2 comprises the sequence PGG. In some aspects, the human immunoglobulin hinge region is from IgAQ1, IgA2, IgD, IgE, IgG1, IgG2, IgG3, or IgM. In some aspects, the functional fragment of a human immunoglobulin hinge and/or constant region comprises (a) an internal subsequence of a hinge and/or constant region; (b) a C-terminal subsequence of a hinge and/or constant region; (c) an N-terminal subsequence of a hinge and/or constant region; (d) a hinge region extended 1 to 10 amino acids towards the N-terminal CH1 domain and/or C-terminal CH2 domain; (e) a subsequence of a hinge region extended 1 to 10 amino acids towards the N-terminal CH1 domain; (f) a subsequence of a hinge region extended 1 to 10 amino acids towards the C-terminal CH2 domain; (g) a sequence comprising 2 or more repeats of (a)-(f); (h) a combination of (a)-(g) corresponding to the same hinge and/or constant region; (i) a combination of (a)-(g) corresponding to different hinges and/or constant regions; or, (j) any combination thereof. In some aspects, the distance between the epitope and the surface of the target cell membrane is estimated using x-ray crystallography, NMR, or cryo-EM structure. In some aspects, the distance between the epitope and the surface of the target cell membrane is estimated using Fluorescence Resonance Energy Transfer (FRET). In some aspects, the CAR induces an increased IFNγ and/or IL-2 expression compared to a corresponding CAR comprising a reference spacer. In some aspects, the CAR induces an increased IFNγ expression by at least about 1.5 fold, at least about 2 fold, at least about 3 fold, at least about 4 fold, at least about 5 fold, at least about 6 fold, at least about 7 fold, at least about 8 fold, at least about 9 fold, at least about 10 fold, at least about 11 fold, at least about 12 fold, at least about 13 fold, at least about 14 fold, at least about 15 fold, at least about 20 fold, compared to a corresponding CAR comprising a reference spacer. In some aspects, the CAR induces an increased IL-2 expression by at least about 1.5 fold, at least about 2 fold, at least about 3 fold, at least about 4 fold, at least about 5 fold, at least about 6 fold, at least about 7 fold, at least about 8 fold, at least about 9 fold, at least about 10 fold, at least about 11 fold, at least about 12 fold, at least about 13 fold, at least about 14 fold, at least about 15 fold, at least about 20 fold, compared to a corresponding CAR comprising a reference spacer. In some aspects, the antigen-binding domain comprises an antibody or an antigen-binding fragment thereof that specifically binds to an epitope on a tumor antigen. In some aspects, the tumor antigen comprises ROR1, HER2, AFP, TRAC, TCRP, BCMA, CLL-1, CS1, CD38, CD19, TSHR, CD123, CD22, CD30, CD70, CD171, CD33, EGFRvIII, GD2, GD3, Tn Ag, PSMA, ROR2, GPC1, GPC2, FLT3, FAP, TAG72, CD44v6, CEA, EPCAM, B7H3, KIT, IL-13Ra2, mesothelin, IL-1 1Ra, PSCA, PRSS21, VEGFR2, LewisY, CD24, PDGFR-beta, SSEA-4, CD20, folate receptor alpha, ERBB2 (Her2/neu), MUC1, MUC16, EGFR, NCAM, prostase, PAP, ELF2M, Ephrin B2, IGF-I receptor, CAIX, LMP2, gplOO, ber-abl, tyrosinase, EphA2, Fucosyl GM1, sLe, GM3, TGS5, HMWMAA, o-acetyl-GD2, Folate receptor beta, TEM1/CD248, TEM7R, CLDN6, GPRC5D, CXORF61, CD97, CD179a, ALK, Polysialic acid, PLAC1, GloboH, NY-BR-1, UPK2, HAVCR1, ADRB3, PANX3, GPR20, LY6K, OR51E2, TARP, WTI, NY-ESO-1, LAGE-la, MAGE-Al, legumain, HPV E6, E7, MAGE Al, ETV6-AML, sperm protein 17, XAGE1, Tie 2, MAD-CT-1, MAD-CT-2, Fos-related antigen 1, p53, p53 mutant, prostein, survivin and telomerase, PCTA-1/Galectin 8, MelanA/MARTI, Ras mutant, hTERT, sarcoma translocation breakpoints, ML-IAP, ERG (TMPRSS2 ETS fusion gene), NA17, PAX3, Androgen receptor, Cyclin B1, MYCN, RhoC, TRP-2, CYP1B1, BORIS, SART3, PAX5, OY-TES1, LCK, AKAP-4, SSX2, RAGE-1, human telomerase reverse transcriptase, RU1, RU2, intestinal carboxyl esterase, mut hsp70-2, CD79a, CD79b, CD72, LAIR1, FCAR, LTLRA2, CD300LF, CLECi2A, BST2, EMR2, LY75, GPC3, FCRL5, IGLL1, CD2, CD3F, CD4, CD5, CD7, the extracellular portion of the APRTL protein, and any combinations thereof.

[0044] In some aspects, the tumor antigen comprises ROR1, CD19 or Her2. In some aspects, the antigen-binding domain comprises an anti-ROR1 antibody or an antigen-binding fragment thereof. In some aspects, the antigen-binding domain cross-competes with the R11 antibody, R12 antibody, or 2A2 antibody. In some aspects, the antigen-binding domain binds to the same epitope as the R11 antibody, R12 antibody, or 2A2 antibody. In some aspects, the antigen-binding domain comprises heavy chain variable region (VH) CDR3 of the R11 antibody, R12 antibody, or 2A2 antibody. In some aspects, the antigen-binding domain further comprises VH CDR1 and VH CDR2. In some aspects, the VH CDR1 comprises the VH CDR1 of the R11 antibody, R12 antibody, or 2A2 antibody and/or the VH CDR2 comprises the VH CDR2 of the R11 antibody, R12 antibody, or 2A2 antibody. In some aspects, the antigen-binding domain further comprises light chain variable region (VL) CDR1, VL CDR2, and/or VL CDR3. In some aspects, the VL CDR1 comprises the VL CDR1 of the R11 antibody, R12 antibody, or 2A2 antibody, the VL CDR2 comprises the VL CDR2 of the R11 antibody, R12 antibody, or 2A2 antibody, and/or the VL CDR3 comprises the VL CDR3 of the R11 antibody, R12 antibody, or 2A2 antibody. In some aspects, the antigen-binding domain comprises: (i) VH CDR1 of SEQ ID NO: 4888; VH CDR2 of SEQ ID NO: 4889; and VH CDR3 of SEQ ID NO: 4890; and/or VL CDR1 of SEQ ID NO: 4892; VL CDR2 of SEQ ID NO: 4893; and VL CDR3 of SEQ ID NO: 4894; (ii) VH CDR1 of SEQ ID NO: 4896; VH CDR2 of SEQ ID NO: 4897; and VH CDR23 of SEQ ID NO: 4898; and/or VL CDR1 of SEQ ID NO: 4900; VL CDR2 of SEQ ID NO: 4901; and VL CDR3 of SEQ ID NO: 4902; or (iii) VH CDR1 of SEQ ID NO: 4904; VH CDR2 of SEQ ID NO: 4905; and VH CDR23 of SEQ ID NO: 4906; and/or VL CDR1 of SEQ ID NO: 4908; VL CDR2 of SEQ ID NO: 4909; and VL CDR3 of SEQ ID NO: 4910.

[0045] In some aspects, the antigen-binding domain comprises a heavy chain variable region (VH) and a light chain variable region (VL), and wherein: (i) the VH comprises SEQ ID NO: 4887; or the VL comprises SEQ ID NO: 4891; (ii) the VH comprises SEQ ID NO: 4895; or the VL comprises SEQ ID NO: 4899; or (iii) the VH comprises SEQ ID NO: 4903; or the VL comprises SEQ ID NO: 4907. In some aspects, the antigen-binding domain comprises a VH comprising SEQ ID NO: 4895 and a VL comprising SEQ ID NO: 4899; and wherein the spacer consists of SEQ ID NO: 4830. In some aspects, the CAR is designed as a standard CAR, a split CAR, an off-switch CAR, an on-switch CAR, a first-generation CAR, a second-generation CAR, a third-generation CAR, or a fourth-generation CAR. In some aspects, the antigen-binding domain is an lg NAR, a Fab, a Fab′, a F(ab)′2, a F(ab)′3, an Fv, a single chain variable fragment (scFv), a bis-scFv, a (scFv)2, a minibody, a diabody, a triabody, a tetrabody, an intrabody, a disulfide stabilized Fv protein (dsFv), a unibody, a nanobody, an affibody, a DARPin, a monobody, an adnectin, an alphabody, or a designed binder. In some aspects, the intracellular domain of the CAR is a signaling domain derived from CD3zeta, FcR gamma, FcR beta, CD3 gamma, CD3 delta, CD3 epsilon, CD5, CD22, CD79a, CD79b, and CD66d. In some aspects, the CAR further comprises a co-stimulatory domain derived from 2B4, HVEM, ICOS, LAG3, DAP10, DAP12, CD27, CD28, 4-1BB (CD137), OX40 (CD134), CD30, CD40, ICOS (CD278), glucocorticoid-induced tumor necrosis factor receptor (GITR), lymphocyte function-associated antigen-1 (LFA-1), CD2, CD7, LIGHT, NKG2C, or B7-H3.

[0046] In some aspects, the polynucleotide is a DNA molecule, or a RNA molecule. In some aspects, the transmembrane domain is linked to the intracellular domain by a linker. In some aspects, the CAR is a bispecific CAR. In some aspects, the CAR is an inducible CAR.

[0047] The present disclosure also provides a vector comprising a polynucleotide disclosed herein operably linked to a regulatory element. In some aspects, the vector is a viral vector, a mammalian vector, or bacterial vector. In some aspects, the vector is a retroviral vector. In some aspects, the vector is selected from the group consisting of an adenoviral vector, a lentivirus, a Sendai virus vector, a baculoviral vector, an Epstein Barr viral vector, a papovaviral vector, a vaccinia viral vector, a herpes simplex viral vector, a hybrid vector, and an adeno associated virus (AAV) vector. In some aspects, the vector is a lentivirus.

[0048] The present disclosure also provides a composition comprising a polynucleotide disclosed herein or a vector disclosed herein. Also provided is a kit comprising a polynucleotide, a vector, or a composition disclosed herein. Also provided is a CAR encoded by one or more polynucleotide sequences or vector disclosed herein. Also provided is a cell genetically modified to express a CAR, comprising a polynucleotide or a vector disclosed herein. In some aspects, the cell is a T cell, a natural killer (NK) cell, a natural killer T (NKT) cell, an ILC cell, a macrophage, or an antigen presenting cell.

[0049] The present disclosure provides a composition comprising a CAR disclosed herein or a cell disclosed herein. The present disclosure also provides a composition disclosed herein for treating a subject in need of a CAR therapy. Also provided is a pharmaceutical composition comprising a cell or a composition disclosed herein for treating cancer in a subject in need thereof. Also provided is a kit comprising a CAR, a cell, a composition or a pharmaceutical composition disclosed herein.

[0050] The present disclosure also provides the use of a polynucleotide, a vector, a composition, a kit, a CAR, a cell, a pharmaceutical composition, or a kit disclosed herein for the manufacture of a medicament for treating cancer in a subject in need thereof. Also provided is a method of stimulating a T cell-mediated immune response to a target cell population or tissue in a subject, comprising administering an effective amount of a cell disclosed herein to the subject. Also provided is a method of providing an anti-tumor immunity in a subject in need thereof, the method comprising administering to the subject an effective amount of a cell disclosed herein. Also provided is a method of treating cancer in a subject in need thereof comprising administering to the subject an effective amount of a cell disclosed herein. Also provided is a method of preparing a population of cells for a therapy comprising transducing a population of cells isolated from a subject with a polynucleotide or a vector disclosed herein. In some aspects, the transduction comprises culturing the cell under suitable condition.

[0051] The present disclosure also provides a method of generating a persisting population of genetically engineered cells in a subject diagnosed with cancer, the method comprising administering to the subject a cell genetically engineered to express a CAR disclosed herein. Also provided is a method of expanding a population of genetically engineered cells in a subject diagnosed with cancer, the method comprising administering to the subject a cell genetically engineered to express a CAR disclosed herein. In some aspects, the cell is a T cell. In some aspects, the cell is an autologous T cell. In some aspects, the subject is a human subject.

[0052] The present disclosure also provides a method to improve one or more properties of a CAR therapy comprising inserting a CAR spacer between an antigen-binding domain and a transmembrane domain of a CAR, wherein the CAR spacer is the spacer recited in a polynucleotide disclosed herein. Also provided is a method to improve one or more properties of a CAR therapy comprising inserting a CAR spacer between an antigen-binding domain and a transmembrane domain of a CAR, wherein the CAR spacer is the spacer recited in a polynucleotide disclosed herein, wherein the spacer is located between the ligand-binding domain and the transmembrane domain. In some aspects, the CAR spacer is the spacer recited in a polynucleotide disclosed herein. In some aspects, the one or more improved properties of the CAR therapy is increased secretion of one or more cytokines. In some aspects, the cytokine secretion induced by the CAR is increased with respect to the secretion observed after administration of a corresponding CAR comprising a reference spacer. In some aspects, the cytokine is an interleukin. In some aspects, the interleukin is interleukin-2. In some aspects, the cytokine is an interferon. In some aspects, the interferon is interferon-gamma.

[0053] The present disclosure also provides a method to design a CAR spacer comprising measuring the distance between the target epitope and the target cell surface, wherein the sequence of the spacer is an Ig hinge sequence, a subsequence thereof, or a combination thereof.

### BRIEF DESCRIPTION OF THE DRAWINGS/FIGURES

[0054] FIG. 1. Schematic representation of a CAR showing its domain organization. The present disclosure relates to the engineering of the extracellular spacer component of CARs. The binding domain can be, e.g., a single chain variable fragment (scFv) in the VH-VL or VL-VH orientation, or any antigen-binding portion of an antibody or combination thereof. The ectodomain comprises an antigen-binding domain and a CAR spacer. The endodomain can also be referred to as an intracellular or intracytoplasmic domain and comprises an ITAM and optional costimulatory modules.

[0055] FIG. 2. Schematic representation showing the differences in structure between different generations of CARs. First generation CARs comprise an antigen-binding domain (e.g., an scFv) connected to ITAM directly via a transmembrane region. Second generation CARs comprise a costimulatory molecule (CM1) interposed between ITAM and the transmembrane domain. Third generation CARs include an additional costimulatory molecule (CM2). In fourth generation CARs a costimulatory molecule has been replaced with an IL-12 inducer. Fifth generation CARs are based on second generation CARs, but they contain a truncated cytoplasmic IL-2 receptor j-chain domain.

[0056] FIG. 3. Schematic representation of the architecture of human immunoglobulins.

[0057] FIG. 4. Schematic representation showing the domain structures of IgAQ1 and IgA2.

[0058] FIG. 5. Schematic representation of IgG1, IgG2, IgG3 and IgG4.

[0059] FIG. 6. Sequence repeats (a or b) present (+) or absent (−) in different IgG3 allotypes. The only naturally occurring sequences are ab, abb, and abbb.

[0060] FIG. 7. Schematic representation of the relationship between spacer length, distance between the target epitope and target cell membrane surface, and the width of the signaling synapse.

[0061] FIG. 8. Schematic representation of the modular structure of the IgG3 hinge, and a library of modular spacers with varying lengths and compositions derived from the IgG3 hinge.

[0062] FIG. 9. List of immunoglobulin-derived spacers used in the examples (Spacers 1-11 and Spacers 13-31). Each spacer can comprise an optional Gly-Ser flexible linker sequence (an exemplary GLy-Ser linker sequence of SEQ ID NO: 4818 is shown; in some aspects the linker can be SEQ ID NO:5088). The tables show the length of each spacer in amino acids and theoretical extended conformation length in angstrom (only spacer, or spacer plus linker). The tables also indicate whether cysteines are present.

[0063] FIG. 10. Bar graph quantitating the levels of IFN-γ secretion after 24 hours by T cells expressing ROR1 CAR with the indicated spacers and Mock (untransduced) T cells in the absence of the target antigen. R12 CART cells were transduced with R12CAR-P2 Å-EGFRt. R12CAR: a CAR directed against human ROR1. P2 Å: a self-cleaving peptide. EGFRt: a truncated human EGFR containing EGFR extracellular Domains III and IV and an EGFR transmembrane domain while lacking EGFR Domains I and II and EGFR intracellular sequence. “Short” reference spacer means an IgG4 spacer of SEQ ID NO: 4911.

[0064] FIG. 11A. Graph summarizing the effects of the indicated spacers on IL-2 and IFN-γ secretion by R12 CART cells during a 24 hr co-culture with H1975 cells expressing human ROR1. R12 CART cells were transduced with R12CAR-P2 Å-EGFRt.

[0065] FIG. 11B. Graphs summarizing the effects of the indicated spacer lengths on IL-2 and IFN-γ secretion by R12 CART cells during a 24 hr co-culture with H1975 cells expressing human ROR1. R12 CART cells were transduced with R12CAR-P2 Å-EGFRt.

[0066] FIG. 11C. Graphs summarizing the correlation between target lytic capabilities and cytokine release profiles of T cells expressing R12 CAR with indicated spacers during a co-culture with H1975 cells expressing human ROR1. Target lytic capabilities were measured by integrating the area under the normalized target cell killing curves (i.e., area under the curve, or AUC). R12 CART cells were transduced with R12 CAR-P2 Å-EGFRt.

[0067] FIGS. 12A, 12B, 12C and 12D. Graphs summarizing effects of the indicated spacers, separated by antibody families from which the spacers originated, on long-term cytotoxic activity of R12 CART cells following repeated exposure to Jeko1 cells that express human ROR1. Mock (untransduced) T cell activity is included in each plot for comparison. The numbers of remaining Jeko1 cells during 3 rounds of co-culture with R12 CART cells were normalized to the first time point of each round (i.e., 0 hr, 68 hr, and 148 hr). R12 CART cells were transduced with R12CAR-P2 Å-EGFRt.

[0068] FIG. 12E. Lengths of the top five spacers (Spacers 1, 11, 13, 14, and Short) selected based on the long-term cytotoxic activity measured in FIGS. 12A, 12B, 12C and 12D.

[0069] FIGS. 13A and 13B. Percentage of transduced cells measured by surface expression of transduction marker EGFRt on primary T cells in donors D3868 (FIG. 13A) and D4869 (FIG. 13B).

[0070] FIGS. 13C and 13D. Median fluorescence intensity (MFI) for bound anti-FMC63 protein on live, transduced cells (EGFRt+ cells) in donor D3868 (FIG. 13C) and donor D4869 (FIG. 13D). Triangles indicate decreasing spacer length within a given immunoglobulin type.

[0071] FIGS. 14A-14E. Effects of indicated spacers on FMC63 CAR-T induced cytotoxicity in the presence of NucLight Red-labeled Raji (Raji-NLR) target cells expressing human CD19 target antigen in donor D3868. FIG. 14A shows the IncuCyte kinetic killing curves for each CAR variant with the indicated spacer. FIG. 14B shows the AUC calculated for each killing curve from FIG. 14A.

[0072] FIGS. 14C-14E are bar graphs showing concentrations of IFN-γ (FIG. 14C), IL-2 (FIG. 14D) and TNFα (FIG. 14E) in co-culture media 24 hours post co-culturing. “Short” reference spacer is an IgG4 hinge-derived spacer of SEQ ID NO: 4911. “Intermediate” reference spacer is an IgG4 hinge-derived spacer of SEQ ID NO:4912. “Long” reference spacer is an IgG4 hinge-derived spacer of SEQ ID NO: 4913. All IncuCyte kinetic killing curves represent NucLight Red signal over time. Non-transduced primary T cell are indicated as “NTC” in this and all drawings.

[0073] FIGS. 15A-15E. Effects of indicated spacers on FMC63 CAR-T induced cytotoxicity in the presence of Raji-NLR target cells expressing human CD19 target antigen in donor D4869. FIG. 15A shows the IncuCyte kinetic killing curves for each CAR variant with the indicated spacer. FIG. 15B shows the AUC calculated for each killing curve from FIG. 14A. FIGS. 15C-15E are bar graphs showing concentrations of IFN-γ (FIG. 15C), IL-2 (FIG. 15D) and TNFα (FIG. 15E) in co-culture media 24 hours post co-culturing.

[0074] FIGS. 16A-16E. Effects of indicated spacers on FMC63 CAR-T induced cytotoxicity in the presence of NucLight Red-labeled Nalm6 (Nalm6-NLR) target cells expressing human CD19 target antigen in donor D3868. FIG. 16A shows the IncuCyte kinetic killing curves for each CAR variant with the indicated spacer. FIG. 16B shows the AUC calculated for each killing curve from FIG. 14A. FIGS. 16C-16E are bar graphs showing concentrations of IFN-γ (FIG. 16C), IL-2 (FIG. 16D) and TNFα (FIG. 16E) in co-culture media 24 hours post co-culturing.

[0075] FIGS. 17A-17E. Effects of indicated spacers on FMC63 CAR-T induced cytotoxicity in the presence of Nalm6-NLR target cell expressing human CD19 target antigen in donor D4869. FIG. 17A shows the IncuCyte kinetic killing curves for each CAR variant with the indicated spacer.

[0076] FIG. 17B shows the AUC calculated for each killing curve from FIG. 14A. FIGS. 17C-17E are bar graphs showing concentrations of IFN-γ (FIG. 17C), IL-2 (FIG. 17D) and TNFα (FIG. 17E) in co-culture media 24 hours post co-culturing.

[0077] FIGS. 18A-18E. Effects of indicated spacers on FMC63 CAR-T induced cytotoxicity in the presence of NucLight Red-labeled Raji target cells with CD19 knocked out (Raji_CD19_KO-NLR) in donor D3868. FIG. 18A shows the IncuCyte kinetic killing curves for each CAR variant with the indicated spacer. FIG. 18B shows the AUC calculated for each killing curve from FIG. 14A. FIG. 18C-18E are bar graphs showing concentrations of IFN-γ (FIG. 18C), IL-2 (FIG. 18D) and TNFα (FIG. 18E) in co-culture media 24 hours post co-culturing.

[0078] FIGS. 19A-19E. Effects of indicated spacers on FMC63 CAR-T induced cytotoxicity in the presence of NucLight Red-labeled Raji target cells with CD19 knocked out (Raji_CD19_KO-NLR) in donor D4869. FIG. 19A shows the IncuCyte kinetic killing curves for each CAR variant with the indicated spacer. FIG. 19B shows the AUC calculated for each killing curve from FIG. 14A. FIG. 19C-19E are bar graphs showing concentrations of IFN-γ (FIG. 19C), IL-2 (FIG. 19D) and TNFα (FIG. 19E) in co-culture media 24 hours post co-culturing.

[0079] FIGS. 20A-20C. Bar graphs showing cytokine secretion profile on FMC63 CAR-T cells derived from donor D3868 expressing indicated spacers in the absence of target cells. The CAR-Ts with spacers exhibiting elevated cytokine production in the absence of target cells are considered to exhibit tonic signaling.

[0080] FIGS. 21A-21C. Bar graphs showing cytokine secretion profile on FMC63 CAR-T cells derived from donor D4869 expressing indicated spacers in the absence of target cells. The CAR-Ts with spacers exhibiting elevated cytokine production in the absence of target cells are considered to exhibit tonic signaling.

[0081] FIGS. 22A-22B. Scatter plots summarizing target-dependent cytokine secretion versus killing AUC for the FMC63 CAR-T (spacers indicated by labels) cells when co-cultured with Raji-NLR cells. FIG. 22A is donor D3868. FIG. 22B is donor D4869. The best-performing spacers are at the top left of the plot (high IFN-γ, high IL-2, and low AUC).

[0082] FIGS. 23A-23D. Scatter plots summarizing the effects of indicated spacer lengths on IL-2 and IFNγ secretion by FMC63 CAR-T cells after a 24-hour co-culture with human CD19 expressing target cells. The shaded boxes indicate the approximate window of spacer lengths that lead to maximal cytokine production. FIG. 23A shows FMC63 CAR-T derived from donor D3868 that was co-cultured with Raji cells. FIG. 23B shows FMC63 CAR-T derived from donor D3868 that was co-cultured with Nalm6 cells. FIG. 23C shows FMC63 CAR-T derived from donor D4869 that was co-cultured with Raji cells. FIG. 23D shows FMC63 CAR-T derived from donor D4869 was co-cultured with Nalm6 cells.

[0083] FIGS. 24A and 24B. Scatter plots summarizing the effects of indicated spacer lengths on killing AUC when Raji cells expressing human CD19 were co-cultured with FMC63 CAR-T cells, derived from donor D3868 (FIG. 24A) and donor D4869 (FIG. 24B), respectively. Spacer names are indicated by the labels. The circles represent the approximate window of spacer lengths that lead to fastest killing kinetics.

[0084] FIGS. 25A-25D. Graphs summarizing the effects of the indicated spacers on long-term cytotoxic activity of FMC63 CAR-T cells following repeated exposure to target cells that express human CD19 from donor D3868. FIG. 25A shows killing curves of Nalm6-NLR target cells during four rounds of co-culture with FMC63 CAR-T cells expressing CARs comprising indicated spacers.

[0085] FIG. 25B highlights a subset of FMC63 CAR-T cells with most persistent long-term cytotoxicity during repeated exposure to Nalm6 cells. FIG. 25C shows killing curves of Raji-NLR target cells during four rounds of co-culture with FMC63 CAR-T cells expressing CARs comprising indicated spacers. FIG. 25D highlights a subset of FMC63 CAR-T cells with most persistent long-term cytotoxicity during repeated exposure to Raji cells.

[0086] FIGS. 26A-26D. Graphs summarizing the effects of the indicated spacers on long-term cytotoxic activity of FMC63 CAR-T cells following repeated exposure to target cells that express human CD19 from donor D4869. FIG. 26A shows killing curves of Nalm6-NLR target cells during four rounds of co-culture with FMC63 CAR-T cells expressing CARs comprising indicated spacers.

[0087] FIG. 26B highlights a subset of FMC63 CAR-T cells with most persistent long-term cytotoxicity during repeated exposure to Nalm6 cells. FIG. 26C shows killing curves of Raji-NLR target cells during four rounds of co-culture with FMC63 CAR-T cells expressing CARs comprising indicated spacers. FIG. 26D highlights a subset of FMC63 CAR-T cells with most persistent long-term cytotoxicity during repeated exposure to Raji cells.

[0088] FIGS. 27A and 27B. Percentage of transduced cells measured by surface expression of transduction marker EGFRt on live primary T cells in donors D13814 (FIG. 27A) and D15842 (FIG. 27B).

[0089] FIGS. 27C and 27D. MFI for bound Protein L on live, transduced cells (EGFRt+ cells) in donor D13814 (FIG. 27C) and donor D15842 (FIG. 27D). Triangles indicate decreasing spacer length within a given immunoglobulin type.

[0090] FIGS. 28A-28E. Effects of indicated spacers on anti-Her2 CAR-T induced cytotoxicity in the presence of NucLight Red-labeled A549 target cells (A549-NLR) expressing human Her2 (human epidermal growth factor receptor 2) target antigen (using T cells from donor D13814). FIG. 28A shows the IncuCyte kinetic killing curves for each CAR variant with the indicated spacer. FIG. 28B shows the AUC calculated for each killing curve from FIG. 28A. FIGS. 28C-28E are bar graphs showing concentrations of IFN-γ (FIG. 28C), IL-2 (FIG. 28D) and TNFα (FIG. 28E) in co-culture media 24 hours post co-culturing.

[0091] FIGS. 29A-29E. Effects of indicated spacers on anti-Her2 CAR-T induced cytotoxicity in the presence of NucLight Red-labeled A549 target cells (A549-NLR) expressing human Her2 (human epidermal growth factor receptor 2) target antigen (using T cells from donor D15842). FIG. 29A shows the IncuCyte kinetic killing curves for each CAR variant with the indicated spacer. FIG. 29B shows the AUC calculated for each killing curve from FIG. 29A. FIGS. 29C-29E are bar graphs showing concentrations of IFN-γ (FIG. 29C), IL-2 (FIG. 29D) and TNFα (FIG. 29E) in co-culture media 24 hours post co-culturing.

[0092] FIGS. 30A-30E. Effects of indicated spacers on anti-Her2 CAR-T induced cytotoxicity in the presence of NucLight Red-labeled T47D target cells (T47D-NLR) expressing human Her2 (human epidermal growth factor receptor 2) target antigen (using T cells from donor D13814). FIG. 30A shows the IncuCyte kinetic killing curves for each CAR variant with the indicated spacer. FIG. 30B shows the AUC calculated for each killing curve from FIG. 30A. FIGS. 30C-30E are bar graphs showing concentrations of IFN-γ (FIG. 30C), IL-2 (FIG. 30D) and TNFα (FIG. 30E) in co-culture media 24 hours post co-culturing.

[0093] FIGS. 31A-31E. Effects of indicated spacers on anti-Her2 CAR-T induced cytotoxicity in the presence of NucLight Red-labeled T47D target cells (T47D-NLR) expressing human Her2 (human epidermal growth factor receptor 2) target antigen (using T cells from donor D15842). FIG. 31A shows the IncuCyte kinetic killing curves for each CAR variant with the indicated spacer. FIG. 31B shows the AUC calculated for each killing curve from FIG. 31A. FIGS. 31C-31E: are bar graphs showing concentrations of IFN-γ (FIG. 31C), IL-2 (FIG. 31D) and TNFα (FIG. 31E) in co-culture media 24 hours post co-culturing.

[0094] FIGS. 32A-32E. Effects of indicated spacers on anti-Her2 CAR-T induced cytotoxicity in the presence of NucLight Red-labeled T47D target cells with Her2 knocked out (T47D_Her2_KO-NLR) (using T cells from donor D13814). FIG. 32A shows the IncuCyte kinetic killing curves for each CAR variant with the indicated spacer. FIG. 32B shows the AUC calculated for each killing curve from FIG. 32A. FIGS. 32C-32E are bar graphs showing concentrations of IFN-γ (FIG. 32C), IL-2 (FIG. 32D) and TNFα (FIG. 32E) in co-culture media 24 hours post co-culturing.

[0095] FIGS. 33A-33E. Effects of indicated spacers on anti-Her2 CAR-T induced cytotoxicity in the presence of NucLight Red-labeled T47D target cells with Her2 knocked out (T47D_Her2_KO-NLR) (using T cells from donor D15842). FIG. 33A shows the IncuCyte kinetic killing curves for each CAR variant with the indicated spacer. FIG. 33B shows the AU) calculated for each killing curve from FIG. 33A. FIGS. 33C-33E are bar graphs showing concentrations of IFN-γ (FIG. 33C), IL-2 (FIG. 33D) and TNFα (FIG. 33E) in co-culture media 24 hours post co-culturing.

[0096] FIGS. 34A-34C. Bar graphs showing cytokine secretion profile (IFNg, FIG. 34A; IL-2, FIG. 34B; TNFa, FIG. 34C) on anti-Her2 (human epidermal growth factor receptor 2) CAR-T cells derived from donor D13814 expressing indicated spacers in the absence of target cells. The CAR-Ts with spacers exhibiting elevated cytokine production in the absence of target cells are considered to exhibit tonic signaling.

[0097] FIGS. 35A-35C. Bar graphs showing cytokine secretion profile (IFNg, FIG. 35A; IL-2, FIG. 35B; TNFa, FIG. 35C) on anti-Her2 CAR-T cells derived from donor D15842 expressing indicated spacers in the absence of target cells. The CAR-Ts with spacers exhibiting elevated cytokine production in the absence of target cells are considered to exhibit tonic signaling.

[0098] FIGS. 36A-36D. Scatter plots summarizing target-dependent cytokine secretion versus killing AUC for the anti-Her2 CAR-T (spacers indicated by labels) cells when co-cultured with human Her2 expressing target cells. FIG. 36A: anti-Her2 CAR-T derived from donor D13814 was co-cultured with A549 cells. FIG. 36B: anti-Her2 CAR-T derived from donor D13814 was co-cultured with T47D cells. FIG. 36C: anti-Her2 CAR-T derived from donor D15842 was co-cultured with A549 cells. FIG. 36D: anti-Her2 CAR-T derived from donor D15842 was co-cultured with T47D cells. The best-performing spacers are at the top left of the plot (high IFN-γ, high IL-2, and low AUC).

[0099] FIGS. 37A-37D. Scatter plots summarizing the effects of indicated spacer lengths on IL-2 and IFNg secretion by anti-Her2 CAR-T cells after a 24-hour co-culture with human Her2 expressing target cells. The shaded boxes indicate the approximate window of spacer lengths that lead to maximal cytokine production. FIG. 37A: anti-Her2 CAR-T derived from donor D13814 was co-cultured with A549 cells. FIG. 37B: anti-Her2 CAR-T derived from donor D13814 was co-cultured with T47D cells. FIG. 37C: anti-Her2 CAR-T derived from donor D15842 was co-cultured with A549 cells. FIG. 37D: anti-Her2 CAR-T derived from donor D15842 was co-cultured with T47D cells.

[0100] FIGS. 38A-38D. Scatter plots summarizing the effects of indicated spacer lengths on killing AUC when target cells expressing human Her2 were co-cultured with anti-Her2 CAR-T cells. FIG. 38A: anti-Her2 CAR-T derived from donor D13814 was co-cultured with A549 cells. FIG. 38B: anti-Her2 CAR-T derived from donor D13814 was co-cultured with T47D cells. FIG. 38C: anti-Her2 CAR-T derived from donor D15842 was co-cultured with A549 cells. FIG. 38D: anti-Her2 CAR-T derived from donor D15842 was co-cultured with T47D cells. Spacer names are indicated by the labels. The circles represent the approximate window of spacer lengths that lead to fastest killing kinetics.

[0101] FIGS. 39A-39D. Graphs summarizing the effects of the indicated spacers on long-term cytotoxic activity of anti-Her2 CAR-T cells from donor D13814 following repeated exposure to target cells that express human Her2. FIG. 39A shows killing curves of A549-NLR target cells during four rounds of co-culture with anti-Her2 CAR-T cells expressing CARs comprising indicated spacers. FIG. 39B highlights a subset of anti-Her2 CAR-T cells with most persistent long-term cytotoxicity during repeated exposure to A549 cells. FIG. 39C shows killing curves of T47D-NLR target cells during four rounds of co-culture with anti-Her2 CAR-T cells expressing CARs comprising indicated spacers.

[0102] FIG. 39D highlights a subset of anti-Her2 CAR-T cells with most persistent long-term cytotoxicity during repeated exposure to T47D cells.

[0103] FIGS. 40A-40D. Graphs summarizing the effects of the indicated spacers on long-term cytotoxic activity of anti-Her2 CAR-T cells from donor D15842 following repeated exposure to target cells that express human Her2. FIG. 40A shows killing curves of A549-NLR target cells during four rounds of co-culture with anti-Her2 CAR-T cells expressing CARs comprising indicated spacers. FIG. 40B highlights a subset of anti-Her2 CAR-T cells with most persistent long-term cytotoxicity during repeated exposure to A549 cells. FIG. 40C shows killing curves of T47D-NLR target cells during four rounds of co-culture with anti-Her2 CAR-T cells expressing CARs comprising indicated spacers.

[0104] FIG. 40D highlights a subset of anti-Her2 CAR-T cells with most persistent long-term cytotoxicity during repeated exposure to T47D cells.

[0105] FIG. 41. Three-dimensional structure of the Ig fold (A), and the topology of the structural elements in the fold (B). The location of the β-strand secondary structure elements and the location of the loop regions connecting the β-strands is shown. As disclosed below, each loop region or fragment thereof (optionally comprising one or more amino acids from an adjacent β-strand) from an immunoglobulin constant domain (e.g., a CH1, CH2, CH3, or CL constant domain) from a human or murine immunoglobulin can be used as a CAR spacer of the present disclosure.

[0106] FIG. 42. Multiple sequence alignment of immunoglobulin heavy chains showing the secondary structure (Conformation) overlaid onto the sequence alignment. As disclosed in the specification, subsequences having a coil secondary structure or enriched in amino acid residues having a coil secondary structure can be used as CAR spacers of the present disclosure. Regions having high concentrations, of proline, cysteine, and glycine, are highlighted.

[0107] FIG. 43. Multiple sequence alignment of immunoglobulin light chains showing the secondary structure (Conformation) overlaid onto the sequence alignment. As disclosed in the specification, subsequences having a coil secondary structure or enriched in amino acid residues having a coil secondary structure can be used as CAR spacers of the present disclosure.

[0108] FIGS. 44A and 44B. Percentage of transduced cells measured by surface expression of transduction marker EGFRt on live primary T cells in donor D7811 (FIG. 44A) and donor D5018 (FIG. 44B). FIGS. 44C and 44D show the MFI for bound hROR1-Fc on live, transduced cells (EGFRt+ cells) in donor D7811 (FIG. 44C) and donor D5018 (FIG. 44D).

[0109] FIGS. 45A-45C. Effects of indicated spacers on R11-CAR-induced cytotoxicity in the presence of NucLight Red-labeled A549 target cells (A549-NLR) expressing human ROR1 target antigen in donor D7811. FIG. 45A shows the AUC calculated for IncuCyte kinetic killing curves for each CAR variant with the indicated spacer. Spacers for which no in vitro functional data was generated are indicated as “nd” (not determined) in this figure and figures below. FIG. 45B-C are bar graphs showing concentrations of IFN-g (B) and IL-2 (C) in co-culture media 24 hours post co-culturing. Open bars indicate measurements outside of assay linear dynamic range, therefore should not be interpreted quantitatively.

[0110] FIGS. 46A-46C. Effects of indicated spacers on R11-CAR-induced cytotoxicity in the presence of NucLight Red-labeled A549 target cells (A549-NLR) expressing human ROR1 target antigen in donor D5018. FIG. 46A shows the AUC calculated for IncuCyte kinetic killing curves for each CAR variant with the indicated spacer. FIG. 46B-C are bar graphs showing concentrations of IFN-g (B) and IL-2 (C) in co-culture media 24 hours post co-culturing. Open bars indicate measurements outside of assay linear dynamic range, therefore should not be interpreted quantitatively.

[0111] FIGS. 47A-47C. Effects of indicated spacers on R11-CAR-induced cytotoxicity in the presence of NucLight Red-labeled H1975 target cells (H1975-NLR) expressing human ROR1 target antigen in donor D7811. FIG. 47A shows the AUC calculated for IncuCyte kinetic killing curves for each CAR variant with the indicated spacer. FIG. 47B-C are bar graphs showing concentrations of IFN-g (B) and IL-2 (C) in co-culture media 24 hours post co-culturing. Open bars indicate measurements outside of assay linear dynamic range, therefore should not be interpreted quantitatively.

[0112] FIGS. 48A-48B. Effects of indicated spacers on R11-CAR-induced cytotoxicity in the presence of NucLight Red-labeled H1975 target cells (H1975-NLR) expressing human ROR1 target antigen in donor D5018. FIG. 48A shows the AUC calculated for IncuCyte kinetic killing curves for each CAR variant with the indicated spacer. FIG. 48B is a bar graph showing concentrations of IFN-g in co-culture media 24 hours post co-culturing.

[0113] FIGS. 49A-49B. Effects of indicated spacers on R11-CAR-induced cytotoxicity in the presence of NucLight Red-labeled A549 target cells with ROR1 knocked out (A549_ROR1_KO-NLR) in donor D7811. FIG. 49A shows the AUC calculated for IncuCyte kinetic killing curves for each CAR variant with the indicated spacer. FIG. 49B is a bar graph showing concentrations of IFN-g in co-culture media 24 hours post co-culturing. A small population of ROR1+ cells is present in A549_ROR1_KO-NLR cell line, which accounts for the apparent killing (A) and cytokine production (B) in this assay.

[0114] FIGS. 50A-50B. Effects of indicated spacers on R11-CAR-induced cytotoxicity in the presence of NucLight Red-labeled A549 target cells with ROR1 knocked out (A549_ROR1_KO-NLR) in donor D5018. FIG. 50A shows the AUC calculated for IncuCyte kinetic killing curves for each CAR variant with the indicated spacer. FIG. 50B is a bar graph showing concentrations of IFN-g in co-culture media 24 hours post co-culturing. A small population of ROR1+ cells is present in A549_ROR1_KO-NLR cell line, which accounts for the apparent killing (A) and cytokine production (B) in this assay.

[0115] FIG. 51. Bar graph showing cytokine secretion profile on R11 CAR-T cells derived from donor D7811 expressing CARs having the indicated spacers in the absence of target cells. No spacer resulted in elevated cytokine production in the absence of target cells to be considered as tonic signaling.

[0116] FIG. 52. Bar graph showing cytokine secretion profile on R11 CAR-T cells derived from donor D5018 expressing CARs having the indicated spacers in the absence of target cells. No spacer resulted in elevated cytokine production in the absence of target cells to be considered as tonic signaling.

[0117] FIG. 53A-53B. Scatter plots summarizing the effects of indicated spacer lengths on target-dependent cytokine secretion (dot size IFN-g), and killing AUC for the R11 CAR-T cells when co-cultured with human ROR1 expressing target cells. FIG. 53A: R11 CAR-T derived from donor D7811 was co-cultured with A549 cells. FIG. 53B: R11 CAR-T derived from donor D7811 was co-cultured with H1975 cells.

[0118] FIG. 54A-54B. Scatter plots summarizing the effects of indicated spacer lengths on target-dependent cytokine secretion (dot size IFN-g), and killing AUC for the R11 CAR-T cells when co-cultured with target cells. FIG. 54A: R11 CAR-T derived from donor D5018 was co-cultured with A549 cells. FIG. 54B: R11 CAR-T derived from donor D5018 was co-cultured with H1975 cells.

[0119] FIGS. 55A and 55B. Percentage of transduced cells measured by surface expression of transduction marker EGFRt on live primary T cells in donor D2735 (FIG. 55A) and donor D5018 (FIG. 55B).

[0120] FIGS. 55C and 55D. MFI for bound hROR1-Fc on live, transduced cells (EGFRt+ cells) in donor D2735 (FIG. 55C) and donor D5018 (FIG. 55D).

[0121] FIGS. 56A-56C. Effects of indicated spacers on R12-CAR-induced cytotoxicity in the presence of NucLight Red-labeled A549 target cells (A549-NLR) expressing human ROR1 target antigen in donor D2735. FIG. 56A shows the AUC calculated for IncuCyte kinetic killing curves for each CAR variant with the indicated spacer. FIGS. 56B and 56C are bar graphs showing concentrations of IFN-g (B) and IL-2 (C) in co-culture media 24 hours post co-culturing. Open bars indicate measurements outside of assay linear dynamic range, therefore should not be interpreted quantitatively.

[0122] FIGS. 57A-57C. Effects of indicated spacers on R12-CAR-induced cytotoxicity in the presence of NucLight Red-labeled A549 target cells (A549-NLR) expressing human ROR1 target antigen in donor D5018. FIG. 57A shows the AUC calculated for IncuCyte kinetic killing curves for each CAR variant with the indicated spacer. FIGS. 57B and 57C are bar graphs showing concentrations of IFN-g (B) and IL-2 (C) in co-culture media 24 hours post co-culturing.

[0123] FIGS. 58A-58C. Effects of indicated spacers on R12-CAR-induced cytotoxicity in the presence of NucLight Red-labeled H1975 target cells (H1975-NLR) expressing human ROR1 target antigen in donor D2735. FIG. 58A shows the AUC calculated for IncuCyte kinetic killing curves for each CAR variant with the indicated spacer. FIGS. 58B and 58C are bar graphs showing concentrations of IFN-g (B) and IL-2 (C) in co-culture media 24 hours post co-culturing. Open bars indicate measurements outside of assay linear dynamic range, therefore should not be interpreted quantitatively.

[0124] FIGS. 59A-59C. Effects of indicated spacers on R12-CAR-induced cytotoxicity in the presence of NucLight Red-labeled H1975 target cells (H1975-NLR) expressing human ROR1 target antigen in donor D5018. FIG. 59A shows the AUC calculated for IncuCyte kinetic killing curves for each CAR variant with the indicated spacer. FIGS. 59B and 59C are bar graphs showing concentrations of IFN-g (B) and IL-2 (C) in co-culture media 24 hours post co-culturing.

[0125] FIGS. 60A-60B. Effects of indicated spacers on R12-CAR-induced cytotoxicity in the presence of NucLight Red-labeled A549 target cells with ROR1 knocked out (A549_ROR1_KO-NLR) in donor D2735. FIG. 60A shows the AUC calculated for IncuCyte kinetic killing curves for each CAR variant with the indicated spacer. FIG. 60B is a bar graph showing concentrations of IFN-g in co-culture media 24 hours post co-culturing. A small population of ROR1+ cells is present in A549_ROR1_KO-NLR cell line, which accounts for the apparent killing (A) and cytokine production (B) in this assay.

[0126] FIGS. 61A-61B. Effects of indicated spacers on R12-CAR-induced cytotoxicity in the presence of NucLight Red-labeled A549 target cells with ROR1 knocked out (A549_ROR1_KO-NLR) in donor D5018. FIG. 61A shows the AUC calculated for IncuCyte kinetic killing curves for each CAR variant with the indicated spacer. FIG. 61B is a bar graph showing concentrations of IFN-g in co-culture media 24 hours post co-culturing. A small population of ROR1+ cells is present in A549_ROR1_KO-NLR cell line, which accounts for the apparent killing (A) and cytokine production (B) in this assay.

[0127] FIG. 62. Bar graph showing cytokine secretion profile on R12 CAR-T cells derived from donor D2735 expressing CARs having the indicated spacers in the absence of target cells. No spacer resulted in elevated cytokine production in the absence of target cells to be considered as tonic signaling.

[0128] FIG. 63. Bar graph showing cytokine secretion profile on R12 CAR-T cells derived from donor D5018 expressing CARs having the indicated spacers in the absence of target cells. No spacer resulted in elevated cytokine production in the absence of target cells to be considered as tonic signaling.

[0129] FIG. 64A-64B. Scatter plots summarizing the effects of indicated spacer lengths on target-dependent cytokine secretion (dot size IFN-g), and killing AUC for the R12 CAR-T cells when co-cultured with human ROR1 expressing target cells. FIG. 64A: R12 CAR-T derived from donor D2735 was co-cultured with A549 cells. FIG. 64B: R12 CAR-T derived from donor D2735 was co-cultured with H1975 cells.

[0130] FIG. 65A-65B. Scatter plots summarizing the effects of indicated spacer lengths on target-dependent cytokine secretion (dot size IFN-g), and killing AUC for the R12 CAR-T cells when co-cultured with target cells. FIG. 65A: R12 CAR-T derived from donor D5018 was co-cultured with A549 cells. FIG. 65B: R12 CAR-T derived from donor D5018 was co-cultured with H1975 cells.

[0131] FIGS. 66A and 66B. Percentage of transduced cells measured by surface expression of transduction marker EGFRt on live primary T cells in donor D2089 (FIG. 66A) and donor D5018 (FIG. 66B).

[0132] FIGS. 66C and 66D show the MFI for bound hROR1-Fc on live, transduced cells (EGFRt+ cells) in donor D2089 (FIG. 66C) and donor D5018 (FIG. 66D).

[0133] FIGS. 67A-67B. Effects of indicated spacers on 2A2-CAR-induced cytotoxicity in the presence of NucLight Red-labeled A549 target cells (A549-NLR) expressing human ROR1 target antigen in donor D2089. FIG. 67A shows the AUC calculated for IncuCyte kinetic killing curves for each CAR variant with the indicated spacer. FIG. 67B is a bar graph showing concentrations of IFN-g in co-culture media 24 hours post co-culturing.

[0134] FIGS. 68A-68B summarize the effects of indicated spacers on 2A2-CAR-induced cytotoxicity in the presence of NucLight Red-labeled A549 target cells (A549-NLR) expressing human ROR1 target antigen in donor D5018. FIG. 68A shows the AUC calculated for IncuCyte kinetic killing curves for each CAR variant with the indicated spacer. FIG. 68B is a bar graph showing concentrations of IFN-g in co-culture media 24 hours post co-culturing.

[0135] FIGS. 69A-69B summarize the effects of indicated spacers on 2A2-CAR-induced cytotoxicity in the presence of NucLight Red-labeled H1975 target cells (H1975-NLR) expressing human ROR1 target antigen in donor D2089. FIG. 69A shows the AUC calculated for IncuCyte kinetic killing curves for each CAR variant with the indicated spacer. FIG. 69B is a bar graph showing concentrations of IFN-g in co-culture media 24 hours post co-culturing. Open bars indicate measurements outside of assay linear dynamic range, therefore should not be interpreted quantitatively.

[0136] FIGS. 70A-70B summarize the effects of indicated spacers on 2A2-CAR-induced cytotoxicity in the presence of NucLight Red-labeled H1975 target cells (H1975-NLR) expressing human ROR1 target antigen in donor D5018. FIG. 70A shows the AUC calculated for IncuCyte kinetic killing curves for each CAR variant with the indicated spacer. FIG. 70B is a bar graph showing concentrations of IFN-g in co-culture media 24 hours post co-culturing. Open bars indicate measurements outside of assay linear dynamic range, therefore should not be interpreted quantitatively.

[0137] FIGS. 71A-71B. Effects of indicated spacers on 2A2-CAR-induced cytotoxicity in the presence of NucLight Red-labeled A549 target cells with ROR1 knocked out (A549_ROR1_KO-NLR) in donor D2089. FIG. 71A shows the AUC calculated for IncuCyte kinetic killing curves for each CAR variant with the indicated spacer. FIG. 71B is a bar graph showing concentrations of IFN-g in co-culture media 24 hours post co-culturing. A small population of ROR1+ cells is present in A549_ROR1_KO-NLR cell line, which accounts for the apparent killing (A) and cytokine production (B) in this assay.

[0138] FIGS. 72A-72B summarize the effects of indicated spacers on 2A2-CAR-induced cytotoxicity in the presence of NucLight Red-labeled A549 target cells with ROR1 knocked out (A549_ROR1_KO-NLR) in donor D5018. FIG. 72A shows the AUC calculated for IncuCyte kinetic killing curves for each CAR variant with the indicated spacer. FIG. 72B is a bar graph showing concentrations of IFN-g in co-culture media 24 hours post co-culturing. A small population of ROR1+ cells is present in A549_ROR1_KO-NLR cell line, which accounts for the apparent killing (A) and cytokine production (B) in this assay.

[0139] FIG. 73. Bar graph showing cytokine secretion profile on 2A2 CAR-T cells derived from donor D2089 expressing CARs having the indicated spacers in the absence of target cells. No spacer resulted in elevated cytokine production in the absence of target cells to be considered as tonic signaling.

[0140] FIG. 74. Bar graph showing cytokine secretion profile on 2A2 CAR-T cells derived from donor D5018 expressing CARs having the indicated spacers in the absence of target cells. No spacer resulted in elevated cytokine production in the absence of target cells to be considered as tonic signaling.

[0141] FIG. 75A-75B. Scatter plots summarizing the effects of indicated spacer lengths on target-dependent cytokine secretion (dot size IFN-g), and killing AUC for the 2A2 CAR-T cells when co-cultured with human ROR1 expressing target cells. FIG. 75A: 2A2 CAR-T derived from donor D2089 was co-cultured with A549 cells. FIG. 75B: 2A2 CAR-T derived from donor D2089 was co-cultured with H1975 cells.

[0142] FIG. 76A-76B. Scatter plots summarizing the effects of indicated spacer lengths on target-dependent cytokine secretion (dot size IFN-g), and killing AUC for the 2A2 CAR-T cells when co-cultured with target cells. FIG. 76A: 2A2 CAR-T derived from donor D5018 was co-cultured with A549 cells. FIG. 76B: 2A2 CAR-T derived from donor D5018 was co-cultured with H1975 cells.

[0143] FIGS. 77A-77E. Scatter plots summarizing the differential effects of indicated spacer lengths on target-dependent cytokine secretion (dot size IFN-g), and killing AUC for the FMC63, Her, R11, R12 and 2A2 CAR-T cells when co-cultured with target cells expressing human CARs. The scatter plots indicate the optimal spacer length for R12 (FIG. 77A), 2A2 (FIG. 77B), FMC63 (FIG. 77C), Her (FIG. 77D) and R11 (FIG. 77E) CARs.

[0144] FIG. 78A. Tumor growth over time in mice treated with 2,000,000 CAR-positive T cells with the indicated R12-spacer construct.

[0145] FIG. 78B. Body weight change over time in mice treated with 2,000,000 CAR-positive T cells with the indicated R12-spacer construct.

[0146] FIG. 79A. Tumor growth over time in mice treated with 500,000 CAR-positive T cells with the indicated R12-spacer construct.

[0147] FIG. 79B. Body weight change over time in mice treated with 500,000 CAR-positive T cells with the indicated R12-spacer construct.

[0148] FIG. 80. Percent survival over time in mice treated with 2,000,000 CAR-positive T cells with the indicated R12-spacer construct.

[0149] FIG. 81. Percent survival over time in mice treated with 500,000 CAR-positive T cells with the indicated R12-spacer construct.

[0150] FIG. 82. Number of CD3+ cells per mL blood on day 1 post T cell dose. High dose represents 2,000,000 CAR-positive T cells with the indicated R12-spacer construct. Low dose represents 500,000 CAR-positive T cells with the indicated R12-spacer construct.

[0151] FIG. 83. Number of CD3+EGFR+ cells (i.e., CAR T cells) per mL blood on day 1 post T cell dose. High dose represents 2,000,000 CAR-positive T cells with the indicated R12-spacer construct. Low dose represents 500,000 CAR-positive T cells with the indicated R12-spacer construct.

[0152] FIGS. 84A-84L. Number of T cells per mL blood over time in mice treated with 2,000,000 CAR-positive T cells with the indicated R12-spacer construct. FIG. 84A shows blood PK for CD3+ cells (all T cells), FIG. 84B shows blood PK for CD3+EGFR+ cells (all CAR T cells), FIG. 84C shows blood PK for CD3+CAR+ cells (all CAR T cells), FIG. 84D shows blood PK for CD8+ cells (all CD8+ T cells), FIG. 84E shows blood PK for CD8+EGFR+ cells (CD8+CAR T cells), FIG. 84F shows blood PK for CD8+CAR+ cells (CD8+CAR T cells), FIG. 84G shows blood PK for CD8+CD4+ cells (all CD8+CD4+ T cells), FIG. 84H shows blood PK for CD8+CD4+EGFR+ cells (CD8+CD4+CAR T cells), FIG. 84I shows blood PK for CD8+CD4+CAR+ cells (CD8+CD4+CAR T cells), FIG. 84J shows blood PK for CD4+ cells (all CD4+ T cells), FIG. 84K shows blood PK for CD4+EGFR+ cells (CD4+CAR T cells), and FIG. 84L shows blood PK for CD4+CAR+ cells (CD4+CAR T cells).

[0153] FIGS. 85A-85L. Number of T cells per mL blood over time in mice treated with 500,000 CAR-positive T cells with the indicated R12-spacer construct. FIG. 85A shows blood PK for CD3+ cells (all T cells), FIG. 85B shows blood PK for CD3+EGFR+ cells (all CAR T cells), FIG. 85C shows blood PK for CD3+CAR+ cells (all CAR T cells), FIG. 85D shows blood PK for CD8+ cells (all CD8+ T cells), FIG. 85E shows blood PK for CD8+EGFR+ cells (CD8+CAR T cells), FIG. 85F shows blood PK for CD8+CAR+ cells (CD8+CAR T cells), FIG. 85G shows blood PK for CD8+CD4+ cells (all CD8+CD4+ T cells), FIG. 85H shows blood PK for CD8+CD4+EGFR+ cells (CD8+CD4+CAR T cells), FIG. 85I shows blood PK for CD8+CD4+CAR+ cells (CD8+CD4+CAR T cells), FIG. 85J shows blood PK for CD4+ cells (all CD4+ T cells), FIG. 85K shows blood PK for CD4+EGFR+ cells (CD4+CAR T cells), and FIG. 85L shows blood PK for CD4+CAR+ cells (CD4+CAR T cells).

### DETAILED DESCRIPTION

[0154] The present disclosure is directed to CARs comprising spacers derived from immunoglobulin (Ig) hinge and/or constant region sequences, polynucleotides encoding such CARs, cells expressing the CARs, and methods for their use. Non-limiting examples of the various aspects are shown in the present disclosure. In some aspects, CAR spacers of the present disclosure are fragments of IgAQ1, IgA2, IgG1, IgG2, IgG3, IgG4, IgD, IgE or IgM hinge and/or constant regions. In some aspects, the CAR spacer comprises a subsequence from an IgM hinge and/or from a constant region, and further contains a short terminal sequence derived from other region(s), e.g., a CAR spacer can comprise a hinge subsequence and a CH1 and/or a CH2 subsequence. In some aspects, a CAR spacer can comprise a sequence connecting two constant regions.

[0155] In some aspects, the CAR spacers derived from constant regions (e.g., heavy chain constant regions and/or light chain constant regions) correspond to unstructured sequences with a high content of Proline, Cysteine, Glycine, or combinations thereof, and generally correspond to solvent accessible loops. See, e.g., FIG. 41 and FIG. 42. For example, Spacer 15 corresponds to the N-terminal region of the flexible loop connecting P-strand A and P-strand B of the CH2 region of IgG1, IgG2, IgG3, or IgG4. Accordingly, in some aspects, a CAR spacer of the present disclosure comprises, consists, or consists essentially of an unstructured flexible loop connecting secondary structure elements (e.g., a helices, R strands, or combinations thereof) in an IgAQ1, IgA2, IgG1, IgG2, IgG3, IgG4, IgD, IgE, or IgM human immunoglobulin, or a fragment of such loop. In some aspects, the loop sequence is obtained from a non-human immunoglobulin. The location of loop sequences suitable to be used as CAR spacers of the present disclosure can be identified by a person skilled in the art, e.g., via structural assignment of amino acid residues in a PDB file using a program such as DSSP, P-SEA, DEFINE_S, SSTRUC, STRIDE, PROSS, or PALSSE. In some aspects, the sequence suitable as a CAR spacer of the present disclosure is an immunoglobulin domain loop sequence comprising at least 1, 2, 3, 4, 5 or 6 proline residues. In some aspects, the sequence suitable as a CAR spacer of the present disclosure is an immunoglobulin domain loop sequence wherein at least about 30%, about 40%, about 50%, about 60%, about 70%, about 80%, or about 90% of amino acid residues are Proline, Cysteine, Glycine, or combinations thereof.

[0156] In some aspects, the CAR spacers of the present disclosure are rationally designed based, e.g., on measurement of the distance between the epitope targeted by the CAR binding moiety and the surface of plasma membrane of the target cell, and/or the intermembrane distance in the signaling synapse. In some aspects, the CAR spacers of the present disclosure are modular sequences comprising at least one polypeptide sequence derived from an IgAQ1, IgA2, IgG1, IgG2, IgG3, IgG4, IgD, IgE or IgM hinge and/or constant region.

[0157] Before the present disclosure is described in greater detail, it is to be understood that this disclosure is not limited to the particular compositions or process steps described, as such can, of course, vary. As will be apparent to those of skill in the art upon reading this disclosure, each of the individual aspects described and illustrated herein has discrete components and features which can be readily separated from or combined with the features of any of the other several aspects without departing from the scope or spirit of the present disclosure. Any recited method can be carried out in the order of events recited or in any other order which is logically possible.

[0158] Headings provided herein are not limitations of the various aspects of the disclosure, which can be defined by reference to the specification as a whole. It is also to be understood that the terminology used herein is for the purpose of describing particular aspects only, and is not intended to be limiting, since the scope of the present disclosure will be limited only by the appended claims.

[0159] Accordingly, the terms defined immediately below are more fully defined by reference to the specification in its entirety.

### I. Terms

[0160] In order that the present description can be more readily understood, certain terms are first defined. Except as otherwise expressly provided herein, each of the following terms shall have the meaning set forth below. Additional definitions are set forth throughout the detailed description.

[0161] It is to be noted that the term “a” or “an” entity refers to one or more of that entity; for example, “a nucleotide sequence,” is understood to represent one or more nucleotide sequences. As such, the terms “a” (or “an”), “one or more,” and “at least one” can be used interchangeably herein. It is further noted that the claims can be drafted to exclude any optional element. As such, this statement is intended to serve as antecedent basis for use of such exclusive terminology as “solely,” “only” and the like in connection with the recitation of claim elements, or use of a negative limitation.

[0162] Furthermore, “and/or” where used herein is to be taken as specific disclosure of each of the two specified features or components with or without the other. Thus, the term “and/or” as used in a phrase such as “A and/or B” herein is intended to include “A and B,” “A or B,” “A” (alone), and “B” (alone). Likewise, the term “and/or” as used in a phrase such as “A, B, and/or C” is intended to encompass each of the following aspects: A, B, and C; A, B, or C; A or C; A or B; B or C; A and C; A and B; B and C; A (alone); B (alone); and C (alone).

[0163] It is understood that wherever aspects are described herein with the language “comprising,” otherwise analogous aspects described in terms of “consisting of” and/or “consisting essentially of” are also provided.

[0164] Unless defined otherwise, all technical and scientific terms used herein have the same meaning as commonly understood by one of ordinary skill in the art to which this disclosure is related. For example, the Concise Dictionary of Biomedicine and Molecular Biology, Juo, Pei-Show, 2nd ed., 2002, CRC Press; The Dictionary of Cell and Molecular Biology, 3rd ed., 1999, Academic Press; and the Oxford Dictionary Of Biochemistry And Molecular Biology, Revised, 2000, Oxford University Press, provide one of skill with a general dictionary of many of the terms used in this disclosure.

[0165] Units, prefixes, and symbols are denoted in their Systeme International de Unites (SI) accepted form. Numeric ranges are inclusive of the numbers defining the range. Where a range of values is recited, it is to be understood that each intervening integer value, and each fraction thereof, between the recited upper and lower limits of that range is also specifically disclosed, along with each subrange between such values. The upper and lower limits of any range can independently be included in or excluded from the range, and each range where either, neither or both limits are included is also encompassed within the disclosure. Thus, ranges recited herein are understood to be shorthand for all of the values within the range, inclusive of the recited endpoints. For example, a range of 1 to 10 is understood to include any number, combination of numbers, or sub-range from the group consisting of 1, 2, 3, 4, 5, 6, 7, 8, 9, and 10.

[0166] Where a value is explicitly recited, it is to be understood that values which are about the same quantity or amount as the recited value are also within the scope of the disclosure. Where a combination is disclosed, each subcombination of the elements of that combination is also specifically disclosed and is within the scope of the disclosure. Conversely, where different elements or groups of elements are individually disclosed, combinations thereof are also disclosed. Where any element of a disclosure is disclosed as having a plurality of alternatives, examples of that disclosure in which each alternative is excluded singly or in any combination with the other alternatives are also hereby disclosed; more than one element of a disclosure can have such exclusions, and all combinations of elements having such exclusions are hereby disclosed.

[0167] Nucleotides are referred to by their commonly accepted single-letter codes. Unless otherwise indicated, nucleotide sequences are written left to right in 5′ to 3′ orientation. Nucleotides are referred to herein by their commonly known one-letter symbols recommended by the IUPAC-IUB Biochemical Nomenclature Commission. Accordingly, ‘a’ represents adenine, ‘c’ represents cytosine, ‘g’ represents guanine, ‘t’ represents thymine, and ‘u’ represents uracil.

[0168] Amino acid sequences are written left to right in amino to carboxy orientation. Amino acids are referred to herein by either their commonly known three letter symbols or by the one-letter symbols recommended by the IUPAC-IUB Biochemical Nomenclature Commission.

[0169] The term “about” is used herein to mean approximately, roughly, around, or in the regions of. When the term “about” is used in conjunction with a numerical range, it modifies that range by extending the boundaries above and below the numerical values set forth. In general, the term “about” can modify a numerical value above and below the stated value by a variance of, e.g., 10 percent, up or down (higher or lower).

[0170] The terms “administration,” “administering,” and grammatical variants thereof refer to introducing a composition of the present disclosure (e.g., a polynucleotide encoding a CAR or a cell expressing a CAR), into a subject via a pharmaceutically acceptable route. The introduction of a composition of the present disclosure (e.g., a polynucleotide encoding a CAR or a cell expressing a CAR), into a subject is by any suitable route, including intratumorally, orally, pulmonarily, intranasally, parenterally (intravenously, intra-arterially, intramuscularly, intraperitoneally, or subcutaneously), rectally, intralymphatically, intrathecally, periocularly or topically.

[0171] Administration includes self-administration and the administration by another. A suitable route of administration allows the composition or the agent to perform its intended function. For example, if a suitable route is intravenous, the composition is administered by introducing the composition or agent into a vein of the subject.

[0172] The term “amino acid substitution” refers to replacing an amino acid residue present in a parent or reference sequence (e.g., a wild type sequence) with another amino acid residue. An amino acid can be substituted in a parent or reference sequence (e.g., a wild type polypeptide sequence), for example, via chemical peptide synthesis or through recombinant methods known in the art. A reference to a “substitution at position X” refers to the substitution of an amino acid present at position X with an alternative amino acid residue. Substitution patterns can be described according to the schema AnY, wherein A is the single letter code corresponding to the amino acid naturally or originally present at position n, and Y is the substituting amino acid residue. In other aspects, substitution patterns can be described according to the schema An(YZ), wherein A is the single letter code corresponding to the amino acid residue substituting the amino acid naturally or originally present at position n, and Y and Z are alternative substituting amino acid residues that can replace A.

[0173] As used herein, the term “approximately,” as applied to one or more values of interest, refers to a value that is similar to a stated reference value. The term “approximately” refers to a range of values that fall within 10%, 9%, 8%, 7%, 6%, 5%, 4%, 3%, 2%, 1%, or less in either direction (greater than or less than) of the stated reference value unless otherwise stated or otherwise evident from the context (except where such number would exceed 100% of a possible value).

[0174] As used herein, the term “conserved” refers to nucleotides or amino acid residues of a polynucleotide sequence or polypeptide sequence, respectively, that are those that occur unaltered in the same position of two or more sequences being compared. Nucleotides or amino acids that are relatively conserved are those that are conserved amongst more related sequences than nucleotides or amino acids appearing elsewhere in the sequences.

[0175] In some aspects, two or more sequences are said to be “completely conserved” or “identical” if they are 100% identical to one another. In some aspects, two or more sequences are said to be “highly conserved” if they are at least about 70% identical, at least about 75% identical, at least about 80% identical, at least about 85% identical, at least about 90% identical, or at least about 95% identical to one another. In some aspects, two or more sequences are said to be “highly conserved” if they are about 70% identical, about 75% identical, about 80% identical, about 85% identical, about 90% identical, about 95% identical, about 98% identical, or about 99% identical to one another. In some aspects, two or more sequences are said to be “conserved” if they are at least about 30% identical, at least about 35% identical, at least about 40% identical, at least about 45% identical, at least about 50% identical, at least about 55%, at least about 60% identical, at least about 65% identical, at least about 70% identical, at least about 75% identical, at least about 80% identical, at least about 85% identical, at least about 90% identical, or at least about 95% identical to one another. In some aspects, two or more sequences are said to be “conserved” if they are about 30% identical, about 35% identical, about 40% identical, about 45% identical, about 50% identical, about 55% identical, about 60% identical, about 65% identical, about 70% identical, about 75% identical, about 80% identical, about 85% identical, about 90% identical, about 95% identical, about 98% identical, or about 99% identical to one another. Conservation of sequence may apply to the entire length of a polynucleotide or polypeptide or may apply to a portion, region or feature thereof.

[0176] “Derived from” as that term is used herein, indicates a relationship (e.g., structural similarity) between a first and a second molecule. For example, in the case of a CAR spacer of the present disclosure comprising an amino acid sequence derived from a human immunoglobulin sequence (e.g., a hinge and/or a constant region sequence), the sequence that is derived from the human immunoglobulin sequence (e.g., a hinge and/or a constant region sequence) can comprise or consist of a full hinge, a hinge fragment, a full hinge or a fragment of an hinge plus additional residues adjacent to the hinge in a wild type immunoglobulin (e.g., one or more amino acids from a constant domain such as a CH1 or CH2 domain), or can comprise or consist of the full sequence of a loop region, a loop region fragment, or a loop region fragment plus additional residues adjacent to the loop in a wild type immunoglobulin (e.g., one or more amino acids from a secondary structure element, e.g., a β-sheet, adjacent to a loop region in a CH1, CH2 or CH3 domain). In some aspects, a spacer derived from constant domain can be derived from a light chain constant domain (CL).

[0177] The term “loop region” as used herein refers to a primary sequence of amino acid residues which connects two regions comprising secondary structure, such as an α-helix or β-sheet, in the immediate N-terminal and C-terminal directions of primary structure from the loop region. Examples of loop regions include, but are not limited to, CH2 or CH3 loop regions. The immunoglobulin fold comprises a 2-layer sandwich of 7-9 antiparallel P-strands arranged in two P-sheets with a Greek key topology. See FIG. 41. Accordingly, constant domain derived CAR spacers of the present disclosure can comprise, consist, or consist essentially of a loop sequence (or a fragment thereof) connecting β-sheet A and β-sheet B, β-sheet B and β-sheet C, β-sheet C and β-sheet C′, P-sheet C′ and β-sheet C″, β-sheet C″ and β-sheet D, β-sheet D and β-sheet E, β-sheet E and β-sheet F, or β-sheet F and β-sheet G, in an immunoglobulin domain, e.g., a constant immunoglobulin domain (e.g., CH1, CH2, CH3, or CL).

[0178] CAR spacers derived from a human Ig immunoglobulin (e.g., a hinge and/or a constant region sequence), disclosed herein also encompass sequences generated by covalently linking via peptidic bonds a hinge region derived sequence as described above, i.e., the spacer can be a polymer comprising multiple repeats of a full hinge, fragments thereof, or combinations thereof.

[0179] In some aspects, a nucleic acid sequence that is derived from a second nucleic acid sequence can include a nucleotide sequence that is identical or substantially similar to the nucleotide sequence of the second nucleic acid sequence. In the case of nucleotides or polypeptides, the derived species can be obtained by, e.g., naturally occurring mutagenesis, artificial directed mutagenesis or artificial random mutagenesis. The mutagenesis used to derive nucleotides or polypeptides can be intentionally directed or intentionally random, or a mixture of each. The mutagenesis of a nucleotide or polypeptide to create a different nucleotide or polypeptide derived from the first can be a random event (e.g., caused by polymerase infidelity) and the identification of the derived nucleotide or polypeptide can be made by appropriate screening methods, e.g., as discussed herein. Mutagenesis of a polypeptide typically entails manipulation of the polynucleotide that encodes the polypeptide.

[0180] In some aspects, a nucleotide or amino acid sequence that is derived from a second nucleotide or amino acid sequence has a sequence identity of at least about 50%, at least about 51%, at least about 52%, at least about 53%, at least about 54%, at least about 55%, at least about 56%, at least about 57%, at least about 58%, at least about 59%, at least about 60%, at least about 61%, at least about 62%, at least about 63%, at least about 64%, at least about 65%, at least about 66%, at least about 67%, at least about 68%, at least about 69%, at least about 70%, at least about 71%, at least about 72%, at least about 73%, at least about 74%, at least about 75%, at least about 76%, at least about 77%, at least about 78%, at least about 79%, at least about 80%, at least about 81%, at least about 82%, at least about 83%, at least about 84%, at least about 85%, at least about 86%, at least about 87%, at least about 88%, at least about 89%, at least about 90%, at least about 91%, at least about 92%, at least about 93%, at least about 94%, at least about 95%, at least about 96%, at least about 97%, at least about 98%, at least about 99%, or about 100% to the second nucleotide or amino acid sequence, respectively, wherein the first nucleotide or amino acid sequence retains the biological activity of the second nucleotide or amino acid sequence.

[0181] The terms “complementary” and “complementarity” refer to two or more oligomers (i.e., each comprising a nucleobase sequence), or between an oligomer and a target gene, that are related with one another by Watson-Crick base-pairing rules. For example, the nucleobase sequence “T-G-A (5′→3′),” is complementary to the nucleobase sequence “A-C-T (3′→5′).” Complementarity may be “partial,” in which less than all of the nucleobases of a given nucleobase sequence are matched to the other nucleobase sequence according to base pairing rules. For example, in some aspects, complementarity between a given nucleobase sequence and the other nucleobase sequence can be about 70%, about 75%, about 80%, about 85%, about 90% or about 95%. Or, there may be “complete” or “perfect” (100%) complementarity between a given nucleobase sequence and the other nucleobase sequence to continue the example. The degree of complementarity between nucleobase sequences has significant effects on the efficiency and strength of hybridization between the sequences.

[0182] The term “downstream” refers to a nucleotide sequence that is located 3′ to a reference nucleotide sequence. In certain aspects, downstream nucleotide sequences relate to sequences that follow the starting point of transcription. For example, the translation initiation codon of a gene is located downstream of the start site of transcription. The term “upstream” refers to a nucleotide sequence that is located 5′ to a reference nucleotide sequence.

[0183] As used herein, the terms “antigen-binding domain” and “antibody” encompass an immunoglobulin whether natural or partly or wholly synthetically produced, and antigen-binding portions thereof. The term also covers any protein having a binding domain that is homologous to an immunoglobulin binding domain. “Antigen-binding domain” and “antibody” further include a polypeptide comprising a framework region from an immunoglobulin gene or portions thereof that specifically binds and recognizes an antigen, and comprises at least one CDR. Use of the terms “antigen-binding domain” and “antibody” is meant to include whole antibodies, polyclonal, monoclonal and recombinant antibodies, portions thereof, and further includes single-chain antibodies, humanized antibodies, murine antibodies, chimeric, mouse-human, mouse-primate, primate-human monoclonal antibodies, anti-idiotype antibodies, antibody constructs, such as, e.g., scFv, (scFv)₂, Fab, Fab′, and F(ab′)₂, F(ab1)₂, Fv, dAb, and Fd, disulfide-linked Fvs (dsFcs), and antibody-related polypeptides.

[0184] In some aspects, an “antigen-binding portion” refers to a polypeptide sequence that makes contacts with the antigen, including but not limited to CDRs derived from an antibody.

[0185] An antigen-binding portion can also be incorporated into single domain antibodies, maxibodies, minibodies, nanobodies, intrabodies, diabodies, triabodies, tetrabodies, v-NAR and bis-scFv (see, e.g., Hollinger and Hudson, Nature Biotechnology 23:1126-1136, 2005). Antigen-binding portions can also be grafted into scaffolds based on polypeptides such as a fibronectin type III (Fn3)(see U.S. Pat. No. 6,703,199, which describes fibronectin polypeptide minibodies). Thus, the terms “antigen-binding domain” and “antibody” include also antibody mimics based on the scaffold of the fibronectin type III domain (monobodies), other scaffolding systems (e.g., tenascin) in which one or more CDRs are grafted, aptamers, etc.

[0186] The terms “antigen-binding domain” and “antibody” also include other suitable antigen-binding domains that can be used according to the present disclosure, e.g., nanobody, VHH antibody, DARPin (designed ankyrin repeat proteins), affibody, monobody, adnectin, alphabody, Albumin-binding domain, Adhiron, Affilin and other gamma-B crystallin-derived artificial proteins, Affimer, Affitin (NANOFITIN™), Anticalin, Armadillo repeat proteins (ARM-repeat protein such as, e.g., P-catenin, a-importing, plakoglobin, adenomatous polyposis coli, ARMC4, ARMCX3, etc.), Atrimer (e.g., tetranectin and derived proteins), Avimer/Maxibody, Centyrin, Fynomer and other Fyn SH3 domain-derived proteins, Kunitz domain, Obody/OB-fold, Pronectin, Repebody, or any synthetic and/or computationally designed binding-protein or scaffold.

[0187] The modular architecture of antibodies has been exploited to create more than 60 different bispecific or multispecific antibody formats. Accordingly, in some aspects, the antibody can be in a format selected, e.g., from crossMab, DAF (Dual Action Fab) (two-in-one), DAF (four-in-one), DutaMab, DT-IgG, Knobs-in-holes common LC, Knobs-in-holes assembly, Charge pair, Fab-arm exchange, SEEDbody, Triomab, LUZ-Y (bispecific antibody with a leucize zipper inducing heterodimerization of two HCs), Fcab, KX-body, Orthogonal Fab, DVD-IgG (dual variable domain IgG), IgG(H)-scFv, scFv-(H)IgG, IgG(L)-scFv, scFv-(L)IgG, IgG(L,H)-Fv, IgG(H)-V, V(H)—IgG, IgG(L)-V, V(L)-IgG, KIH IgG-scFab, 2scFv-IgG, IgG-2scFv, scFv4-Ig, Zybody, DVI-IgG (four-in-one), Nanobody, Nanobody-HSA, BiTE (bispecific T cell engager), Diabody, DART (dual-affinity-retargeting), TandAb (tandem antibody), scDiabody, scDiabody-CH3, Triple Body, Miniantibody, Minibody, TriBi minibody, scFv-CH3 KIH, Fab-scFv, scFv-CH-CL-scFv, F(ab′)2, F(ab′)2-ScFv2, scFv-KIH, Fab-scFv-Fc, Tetravalent HC Ab, scDiabody-Fc, Diabody-Fc, Tandem scFv-Fc, Intrabody, Dock and Locck, ImmTAC, HSAbody, scDiabody-HSA, Tandem scFv-Toxin, IgG-IgG, Cov-X-Body, and scFvl-PEG-scFV2.

[0188] “Antigen-binding domain” and “antibody” also include bispecific and multispecific antibodies so long as they exhibit the desired biological activity or function. In some aspects, the CAR of the present disclosure comprising an extracellular antigen-binding domain, e.g., an scFv.

[0189] The term “scFv” refers to a fusion protein comprising at least one antibody portion comprising a variable region of a light chain and at least one antibody portion comprising a variable region of a heavy chain, wherein the light and heavy chain variable regions are contiguously linked, e.g., via a synthetic linker, e.g., a short flexible polypeptide linker, and capable of being expressed as a single chain polypeptide, and wherein the scFv retains the specificity of the intact antibody from which it is derived. Unless specified, as used herein an scFv may have the VL and VH variable regions in either order, e.g., with respect to the N-terminal and C-terminal ends of the polypeptide, the scFv may comprise VL-linker-VH or may comprise VH-linker-VL.

[0190] The term “complementarity determining region” or “CDR,” as used herein, refers to the sequences of amino acids within antibody variable regions which confer antigen specificity and binding affinity. For example, in general, there are three CDRs in each heavy chain variable region (e.g., HCDR1, HCDR2, and HCDR3) and three CDRs in each light chain variable region (LCDR1, LCDR2, and LCDR3). The precise amino acid sequence boundaries of a given CDR can be determined using any of a number of well-known schemes, including those described by Kabat et al. (1991), “Sequences of Proteins of Immunological Interest,” 5th Ed. Public Health Service, National Institutes of Health, Bethesda, Md. (“Kabat” numbering scheme), Al-Lazikani et al., (1997) JMB 273,927-948 (“Chothia” numbering scheme), or a combination thereof. Under the Kabat numbering scheme, in some embodiments, the CDR amino acid residues in the heavy chain variable domain (VH) are numbered 31-35 (HCDR1), 50-65 (HCDR2), and 95-102 (HCDR3); and the CDR amino acid residues in the light chain variable domain (VL) are numbered 24-34 (LCDR1), 50-56 (LCDR2), and 89-97 (LCDR3). Under the Chothia numbering scheme, in some embodiments, the CDR amino acids in the VH are numbered 26-32 (HCDR1), 52-56 (HCDR2), and 95-102 (HCDR3); and the CDR amino acid residues in the VL are numbered 26-32 (LCDR1), 50-52 (LCDR2), and 91-96 (LCDR3). In a combined Kabat and Chothia numbering scheme, in some embodiments, the CDRs correspond to the amino acid residues that are part of a Kabat CDR, a Chothia CDR, or both. For instance, in some embodiments, the CDRs correspond to amino acid residues 26-35 (HCDR1), 50-65 (HCDR2), and 95-102 (HCDR3) in a VH, e.g., a mammalian VH, e.g., a human VH; and amino acid residues 24-34 (LCDR1), 50-56 (LCDR2), and 89-97 (LCDR3) in a VL, e.g., a mammalian VL, e.g., a human VL.

[0191] The term “antigen” refers to a molecule that provokes an immune response. This immune response may involve either antibody production, or the activation of specific immunologically-competent cells, or both. The skilled artisan will understand that any macromolecule, including virtually all proteins or peptides, can serve as an antigen. Furthermore, antigens can be derived from recombinant or genomic DNA.

[0192] As used herein, the term “epitope” refers to the moieties of an antigen that specifically interact with an antibody molecule. Such moieties, referred to herein as epitopic determinants, typically comprise, or are part of, elements such as amino acid side chains or sugar side chains. An epitopic determinate can be defined, e.g., by methods known in the art, e.g., by crystallography or by hydrogen-deuterium exchange. At least one or some of the moieties on the antibody molecule that specifically interact with an epitopic determinant are typically located in a CDR(s). Typically an epitope has a specific three dimensional structural characteristics. Typically an epitope has specific charge characteristics. Some epitopes are linear epitopes while others are conformational epitopes.

[0193] The term “autologous” refers to any material derived from the same individual to whom it is later to be re-introduced into the individual.

[0194] The term “Chimeric Antigen Receptor” or alternatively a “CAR” refers to a set of polypeptides, typically two in the simplest form, which when in an immune effector cell, provides the cell with specificity for a target cell, typically a cancer cell, and with intracellular signal generation. In some aspects, a CAR comprises at least an extracellular antigen-binding domain, a transmembrane domain and a cytoplasmic signaling domain (also referred to as “an intracellular signaling domain”) comprising a functional signaling domain derived from a stimulatory molecule and/or costimulatory molecule as defined below. In some aspects, the set of polypeptides are in the same polypeptide chain, e.g., comprise a chimeric fusion protein. In some aspects, the set of polypeptides are not contiguous with each other, e.g., are in different polypeptide chains. In some aspects, the set of polypeptides include a dimerization switch that, upon the presence of a dimerization molecule, can couple the polypeptides to one another, e.g., can couple an antigen-binding domain to an intracellular signaling domain. In some aspects, the stimulatory molecule of the CAR is the zeta chain associated with the T cell receptor complex (CD3 zeta). In some aspects, the cytoplasmic signaling domain comprises a primary signaling domain (e.g., a primary signaling domain of CD3 zeta). In some aspects, the cytoplasmic signaling domain further comprises one or more functional signaling domains derived from at least one costimulatory molecule defined below. In some aspects, the costimulatory molecule is chosen from the costimulatory molecules described herein, e.g., 4-1BB, CD27, and/or CD28.

[0195] In some aspects, the CAR comprises a chimeric fusion protein comprising an antigen-binding domain, a transmembrane domain and an intracellular signaling domain comprising a functional signaling domain derived from a stimulatory molecule, wherein the antigen-binding domain and the transmembrane domain are linked by a CAR spacer. In some aspects, the CAR comprises a chimeric fusion protein comprising an antigen-binding domain linked to a transmembrane domain via a CAR spacer and an intracellular signaling domain comprising a functional signaling domain derived from a costimulatory molecule and a functional signaling domain derived from a stimulatory molecule. In some aspects, the CAR comprises a chimeric fusion protein comprising an antigen-binding domain linked to a transmembrane domain via a CAR spacer and an intracellular signaling domain comprising two functional signaling domains derived from one or more costimulatory molecule(s) and a functional signaling domain derived from a stimulatory molecule. In some aspects, the CAR comprises a chimeric fusion protein comprising an antigen-binding domain linked to a transmembrane domain via a CAR spacer and an intracellular signaling domain comprising at least two functional signaling domains derived from one or more costimulatory molecule(s) and a functional signaling domain derived from a stimulatory molecule. In some aspects, the CAR comprises an optional leader sequence at the amino-terminus (N-terminus) of the CAR. In some aspects, the CAR further comprises a leader sequence at the N-terminus of the antigen-binding domain, wherein the leader sequence is optionally cleaved from the antigen-binding domain (e.g., a scFv) during cellular processing and localization of the CAR to the cellular membrane.

[0196] The term “cancer” refers to a disease characterized by the uncontrolled growth of aberrant cells. Cancer cells can spread locally or through the bloodstream and lymphatic system to other parts of the body. Examples of various cancers are described herein and include but are not limited to, breast cancer, prostate cancer, ovarian cancer, cervical cancer, skin cancer, pancreatic cancer, colorectal cancer, renal cancer, liver cancer, brain cancer, lymphoma, leukemia, lung cancer and the like. The terms “tumor” and “cancer” are used interchangeably herein, e.g., both terms encompass solid and liquid, e.g., diffuse or circulating, tumors. As used herein, the term “cancer” or “tumor” includes premalignant, as well as malignant cancers and tumors.

[0197] The terms “cancer associated antigen” or “tumor antigen” or variants thereof interchangeably refer to a molecule (typically protein, carbohydrate or lipid) that is preferentially expressed on the surface of a cancer cell, either entirely or as a fragment (e.g., MHC/peptide), in comparison to a normal cell, and which is useful for the preferential targeting of a pharmacological agent to the cancer cell. In some aspects, a tumor antigen is a marker expressed by both normal cells and cancer cells, e.g., a lineage marker, e.g., CD19 on B cells. In certain aspects, the tumor antigen is derived from, cancers including but not limited to primary or metastatic melanoma, thymoma, lymphoma, sarcoma, lung cancer, liver cancer, non-Hodgkin lymphoma, Hodgkin lymphoma, leukemias, uterine cancer, cervical cancer, bladder cancer, kidney cancer and adenocarcinomas such as breast cancer, prostate cancer, ovarian cancer, pancreatic cancer, and the like.

[0198] In some aspects, the tumor antigen is an antigen that is common to a specific proliferative disorder. In some aspects, a cancer-associated antigen is a cell surface molecule that is overexpressed in a cancer cell in comparison to a normal cell, for instance, 1-fold over expression, 2-fold overexpression, 3-fold overexpression or more in comparison to a normal cell. In some aspects, a cancer-associated antigen is a cell surface molecule that is inappropriately synthesized in the cancer cell, for instance, a molecule that contains deletions, additions or mutations in comparison to the molecule expressed on a normal cell. In some aspects, a cancer-associated antigen will be expressed exclusively on the cell surface of a cancer cell, entirely or as a fragment (e.g., MHC/peptide), and not synthesized or expressed on the surface of a normal cell.

[0199] The term “anti-cancer effect” refers to a biological effect which can be manifested by various means, including but not limited to, e.g., a decrease in tumor volume, a decrease in the number of cancer cells, a decrease in the number of metastases, an increase in life expectancy, decrease in cancer cell proliferation, decrease in cancer cell survival, or amelioration of various physiological symptoms associated with the cancerous condition.

[0200] An “anti-cancer effect” can also be manifested by the ability of the CAR, polynucleotides encoding CARs, vectors, and cells described herein in prevention of the occurrence of cancer in the first place. The term “anti-tumor effect” refers to a biological effect which can be manifested by various means, including but not limited to, e.g., a decrease in tumor volume, a decrease in the number of tumor cells, a decrease in tumor cell proliferation, or a decrease in tumor cell survival.

[0201] A “conservative amino acid substitution” is one in which the amino acid residue is replaced with an amino acid residue having a similar side chain. Families of amino acid residues having similar side chains have been defined in the art, including basic side chains (e.g., lysine, arginine, histidine), acidic side chains (e.g., aspartic acid, glutamic acid), uncharged polar side chains (e.g., glycine, asparagine, glutamine, serine, threonine, tyrosine, cysteine), nonpolar side chains (e.g., alanine, valine, leucine, isoleucine, proline, phenylalanine, methionine, tryptophan), beta-branched side chains (e.g., threonine, valine, isoleucine) and aromatic side chains (e.g., tyrosine, phenylalanine, tryptophan, histidine). Thus, if an amino acid in a polypeptide is replaced with another amino acid from the same side chain family, the substitution is considered to be conservative. In another aspect, a string of amino acids can be conservatively replaced with a structurally similar string that differs in order and/or composition of side chain family members.

[0202] Non-conservative amino acid substitutions include those in which (i) a residue having an electropositive side chain (e.g., Arg, His or Lys) is substituted for, or by, an electronegative residue (e.g., Glu or Asp), (ii) a hydrophilic residue (e.g., Ser or Thr) is substituted for, or by, a hydrophobic residue (e.g., Ala, Leu, Ile, Phe or Val), (iii) a cysteine or proline is substituted for, or by, any other residue, or (iv) a residue having a bulky hydrophobic or aromatic side chain (e.g., Val, His, Ile or Trp) is substituted for, or by, one having a smaller side chain (e.g., Ala or Ser) or no side chain (e.g., Gly).

[0203] Other amino acid substitutions can also be used. For example, for the amino acid alanine, a substitution can be taken from any one of D-alanine, glycine, beta-alanine, L-cysteine and D-cysteine. For lysine, a replacement can be any one of D-lysine, arginine, D-arginine, homo-arginine, methionine, D-methionine, ornithine, or D-ornithine. Generally, substitutions in functionally important regions that can be expected to induce changes in the properties of isolated polypeptides are those in which (i) a polar residue, e.g., serine or threonine, is substituted for (or by) a hydrophobic residue, e.g., leucine, isoleucine, phenylalanine, or alanine; (ii) a cysteine residue is substituted for (or by) any other residue; (iii) a residue having an electropositive side chain, e.g., lysine, arginine or histidine, is substituted for (or by) a residue having an electronegative side chain, e.g., glutamic acid or aspartic acid; or (iv) a residue having a bulky side chain, e.g., phenylalanine, is substituted for (or by) one not having such a side chain, e.g., glycine. The likelihood that one of the foregoing non-conservative substitutions can alter functional properties of the protein is also correlated to the position of the substitution with respect to functionally important regions of the protein: some non-conservative substitutions can accordingly have little or no effect on biological properties.

[0204] In the content of the present disclosure, the terms “mutation” and “amino acid substitution” as defined above (sometimes referred simply as a “substitution”) are considered interchangeable.

[0205] In the context of the present disclosure, substitutions (even when they are referred to as amino acid substitution) are conducted at the nucleic acid level, i.e., substituting an amino acid residue with an alternative amino acid residue is conducted by substituting the codon encoding the first amino acid with a codon encoding the second amino acid.

[0206] As used herein, the term “homology” refers to the overall relatedness between polymeric molecules, e.g. between nucleic acid molecules (e.g. DNA molecules and/or RNA molecules) and/or between polypeptide molecules. Generally, the term “homology” implies an evolutionary relationship between two molecules. Thus, two molecules that are homologous will have a common evolutionary ancestor. In the context of the present disclosure, the term homology encompasses both to identity and similarity.

[0207] In some aspects, polymeric molecules are considered to be “homologous” to one another if at least about 25%, at least about 30%, at least about 35%, at least about 40%, at least about 45%, at least about 50%, at least about 55%, at least about 60%, at least about 65%, at least about 70%, at least about 75%, at least about 80%, at least about 85%, at least about 90%, at least about 95%, or at least about 99% of the monomers in the molecule are identical (exactly the same monomer) or are similar (conservative substitutions). The term “homologous” necessarily refers to a comparison between at least two sequences (polynucleotide or polypeptide sequences).

[0208] As used herein, the term “identity” refers to the overall monomer conservation between polymeric molecules, e.g., between polypeptide molecules or polynucleotide molecules (e.g. DNA molecules and/or RNA molecules). The term “identical” without any additional qualifiers, e.g., protein A is identical to protein B, implies the sequences are 100% identical (100% sequence identity). Describing two sequences as, e.g., “70% identical,” is equivalent to describing them as having, e.g., “70% sequence identity.”

[0209] Calculation of the percent identity of two polypeptide sequences, for example, can be performed by aligning the two sequences for optimal comparison purposes (e.g., gaps can be introduced in one or both of a first and a second polypeptide sequences for optimal alignment and non-identical sequences can be disregarded for comparison purposes). In certain aspects, the length of a sequence aligned for comparison purposes is at least 30%, at least 40%, at least 50%, at least 60%, at least 70%, at least 80%, at least 90%, at least 95%, or 100% of the length of the reference sequence. The amino acids at corresponding amino acid positions are then compared.

[0210] When a position in the first sequence is occupied by the same amino acid as the corresponding position in the second sequence, then the molecules are identical at that position. The percent identity between the two sequences is a function of the number of identical positions shared by the sequences, taking into account the number of gaps, and the length of each gap, which needs to be introduced for optimal alignment of the two sequences. The comparison of sequences and determination of percent identity between two sequences can be accomplished using a mathematical algorithm.

[0211] Suitable software programs are available from various sources, and for alignment of both protein and nucleotide sequences. One suitable program to determine percent sequence identity is b12seq, part of the BLAST suite of program available from the U.S. government's National Center for Biotechnology Information BLAST web site (blast.ncbi.nlm.nih.gov). B12seq performs a comparison between two sequences using either the BLASTN or BLASTP algorithm. BLASTN is used to compare nucleic acid sequences, while BLASTP is used to compare amino acid sequences. Other suitable programs are, e.g., Needle, Stretcher, Water, or Matcher, part of the EMBOSS suite of bioinformatics programs and also available from the European Bioinformatics Institute (EBI) at www.ebi.ac.uk/Tools/psa.

[0212] Sequence alignments can be conducted using methods known in the art such as MAFFT, Clustal (ClustalW, Clustal X or Clustal Omega), MUSCLE, etc.

[0213] Different regions within a single polynucleotide or polypeptide target sequence that aligns with a polynucleotide or polypeptide reference sequence can each have their own percent sequence identity. It is noted that the percent sequence identity value is rounded to the nearest tenth. For example, 80.11, 80.12, 80.13, and 80.14 are rounded down to 80.1, while 80.15, 80.16, 80.17, 80.18, and 80.19 are rounded up to 80.2. It also is noted that the length value will always be an integer.

[0214] In certain aspects, the percentage identity (% ID) or of a first amino acid sequence (or nucleic acid sequence) to a second amino acid sequence (or nucleic acid sequence) is calculated as % ID=100×(Y/Z), where Y is the number of amino acid residues (or nucleobases) scored as identical matches in the alignment of the first and second sequences (as aligned by visual inspection or a particular sequence alignment program) and Z is the total number of residues in the second sequence. If the length of a first sequence is longer than the second sequence, the percent identity of the first sequence to the second sequence will be higher than the percent identity of the second sequence to the first sequence.

[0215] One skilled in the art will appreciate that the generation of a sequence alignment for the calculation of a percent sequence identity is not limited to binary sequence-sequence comparisons exclusively driven by primary sequence data. It will also be appreciated that sequence alignments can be generated by integrating sequence data with data from heterogeneous sources such as structural data (e.g., crystallographic protein structures), functional data (e.g., location of mutations), or phylogenetic data. A suitable program that integrates heterogeneous data to generate a multiple sequence alignment is T-Coffee, available at www.tcoffee.org, and alternatively available, e.g., from the EBI. It will also be appreciated that the final alignment used to calculate percent sequence identity can be curated either automatically or manually.

[0216] As used herein, the term “similarity” refers to the overall relatedness between polymeric molecules, e.g. between polynucleotide molecules (e.g. DNA molecules and/or RNA molecules) and/or between polypeptide molecules. Calculation of percent similarity of polymeric molecules to one another can be performed in the same manner as a calculation of percent identity, except that calculation of percent similarity takes into account conservative substitutions as is understood in the art. It is understood that percentage of similarity is contingent on the comparison scale used, i.e., whether the amino acids are compared, e.g., according to their evolutionary proximity, charge, volume, flexibility, polarity, hydrophobicity, aromaticity, isoelectric point, antigenicity, or combinations thereof.

[0217] As used herein, the terms “isolated,” “purified,” “extracted,” and grammatical variants thereof are used interchangeably and refer to the state of a preparation of desired composition of the present disclosure, e.g., a CAR of the present disclosure, that has undergone one or more processes of purification. In some aspects, isolating or purifying as used herein is the process of removing, partially removing (e.g., a fraction) of a composition of the present disclosure, e.g., a CAR of the present disclosure from a sample containing contaminants.

[0218] In some aspects, an isolated composition has no detectable undesired activity or, alternatively, the level or amount of the undesired activity is at or below an acceptable level or amount. In other aspects, an isolated composition has an amount and/or concentration of desired composition of the present disclosure, at or above an acceptable amount and/or concentration and/or activity. In other aspects, the isolated composition is enriched as compared to the starting material from which the composition is obtained. This enrichment can be by at least about 10%, at least about 15%, at least about 20%, at least about 25%, at least about 30%, at least about 35%, at least about 40%, at least about 45%, at least about 50%, at least about 55%, at least about 60%, at least about 65%, at least about 70%, at least about 75%, at least about 80%, at least about 85%, at least about 90%, at least about 95%, at least about 96%, at least about 97%, at least about 98%, at least about 99%, at least about 99.9%, at least about 99.99%, at least about 99.999%, at least about 99.9999%, or greater than 99.99999% as compared to the starting material.

[0219] In some aspects, isolated preparations are substantially free of residual biological products. In some aspects, the isolated preparations are 100% free, at least about 99% free, at least about 98% free, at least about 97% free, at least about 96% free, at least about 95% free, at least about 94% free, at least about 93% free, at least about 92% free, at least about 91% free, or at least about 90% free of any contaminating biological matter. Residual biological products can include abiotic materials (including chemicals) or unwanted nucleic acids, proteins, lipids, or metabolites.

[0220] “Nucleic acid,” “nucleic acid molecule,” “nucleotide sequence,” “polynucleotide,” and grammatical variants thereof are used interchangeably and refer to the phosphate ester polymeric form of ribonucleosides (adenosine, guanosine, uridine or cytidine; “RNA molecules”) or deoxyribonucleosides (deoxyadenosine, deoxyguanosine, deoxythymidine, or deoxycytidine; “DNA molecules”), or any phosphoester analogs thereof, such as phosphorothioates and thioesters, in either single stranded form, or a double-stranded helix. Single stranded nucleic acid sequences refer to single-stranded DNA (ssDNA) or single-stranded RNA (ssRNA). Double stranded DNA-DNA, DNA-RNA and RNA-RNA helices are possible. The term nucleic acid molecule, and in particular DNA or RNA molecule, refers only to the primary and secondary structure of the molecule, and does not limit it to any particular tertiary forms. Thus, this term includes double-stranded DNA found, inter alia, in linear or circular DNA molecules (e.g., restriction fragments), plasmids, supercoiled DNA and chromosomes. In discussing the structure of particular double-stranded DNA molecules, sequences can be described herein according to the normal convention of giving only the sequence in the 5′ to 3′ direction along the non-transcribed strand of DNA (i.e., the strand having a sequence homologous to the mRNA).

[0221] A “recombinant DNA molecule” is a DNA molecule that has undergone a molecular biological manipulation. DNA includes, but is not limited to, cDNA, genomic DNA, plasmid DNA, synthetic DNA, and semi-synthetic DNA. A “nucleic acid composition” of the disclosure comprises one or more nucleic acids as described herein.

[0222] The term “polynucleotide” as used herein refers to polymers of nucleotides of any length, including ribonucleotides, deoxyribonucleotides, analogs thereof, or mixtures thereof. This term refers to the primary structure of the molecule. Thus, the term includes triple-, double- and single-stranded deoxyribonucleic acid (“DNA”), as well as triple-, double- and single-stranded ribonucleic acid (“RNA”). It also includes modified, for example by alkylation, and/or by capping, and unmodified forms of the polynucleotide. More particularly, the term “polynucleotide” includes polydeoxyribonucleotides (containing 2-deoxy-D-ribose) and polyribonucleotides (containing D-ribose), including mRNA, whether spliced or unspliced, any other type of polynucleotide which is an N- or C-glycoside of a purine or pyrimidine base, and other polymers containing normucleotidic backbones, for example, polyamide (e.g., peptide nucleic acids “PNAs”) and polymorpholino polymers, and other synthetic sequence-specific nucleic acid polymers providing that the polymers contain nucleobases in a configuration which allows for base pairing and base stacking, such as is found in DNA and RNA.

[0223] In some aspects, a polynucleotide disclosed herein comprises a DNA, e.g., a DNA inserted in a vector. In other aspects, a polynucleotide disclosed herein comprises an mRNA. In some aspects, the mRNA is a synthetic mRNA. In some aspects, the synthetic mRNA comprises at least one unnatural nucleobase. In some aspects, all nucleobases of a certain class have been replaced with unnatural nucleobases (e.g., all uridines in a polynucleotide disclosed herein can be replaced with an unnatural nucleobase, e.g., 5-methoxyuridine).

[0224] The term “encoding” refers to the inherent property of specific sequences of nucleotides in a polynucleotide, such as a gene, a cDNA, or an mRNA, to serve as templates for synthesis of other polymers and macromolecules in biological processes having either a defined sequence of nucleotides (e.g., rRNA, tRNA and mRNA) or a defined sequence of amino acids and the biological properties resulting therefrom. Thus, a gene, cDNA, or RNA, encodes a protein if transcription and translation of mRNA corresponding to that gene produces the protein in a cell or other biological system. Both the coding strand, the nucleotide sequence of which is identical to the mRNA sequence and is usually provided in sequence listings, and the non-coding strand, used as the template for transcription of a gene or cDNA, can be referred to as encoding the protein or other product of that gene or cDNA.

[0225] Unless otherwise specified, a nucleotide sequence “encoding” an amino acid sequence,” e.g., a polynucleotide “encoding” a CAR of the present disclosure, includes all nucleotide sequences that are degenerate versions of each other and that encode the same amino acid sequence.

[0226] The term “expression” refers to the transcription and/or translation of a particular nucleotide sequence driven by a promoter.

[0227] The terms “polypeptide,” “peptide,” and “protein” are used interchangeably herein to refer to polymers of amino acids of any length. The polymer can comprise modified amino acids. The terms also encompass an amino acid polymer that has been modified naturally or by intervention; for example, disulfide bond formation, glycosylation, lipidation, acetylation, phosphorylation, or any other manipulation or modification, such as conjugation with a labeling component. Also included within the definition are, for example, polypeptides containing one or more analogs of an amino acid (including, for example, unnatural amino acids such as homocysteine, ornithine, p-acetylphenylalanine, D-amino acids, and creatine), as well as other modifications known in the art.

[0228] The term “polypeptide,” as used herein, refers to proteins, polypeptides, and peptides of any size, structure, or function. Polypeptides include gene products, naturally occurring polypeptides, synthetic polypeptides, homologs, orthologs, paralogs, fragments and other equivalents, variants, and analogs of the foregoing. A polypeptide can be a single polypeptide or can be a multi-molecular complex such as a dimer, trimer or tetramer. They can also comprise single chain or multichain polypeptides. Most commonly disulfide linkages are found in multichain polypeptides. The term polypeptide can also apply to amino acid polymers in which one or more amino acid residues are an artificial chemical analogue of a corresponding naturally occurring amino acid. In some aspects, a “peptide” can be less than or equal to 50 amino acids long, e.g., about 5, 10, 15, 20, 25, 30, 35, 40, 45, or 50 amino acids long.

[0229] A “recombinant” polypeptide or protein refers to a polypeptide or protein produced via recombinant DNA technology. Recombinantly produced polypeptides and proteins expressed in engineered host cells are considered isolated for the purpose of the disclosure, as are native or recombinant polypeptides which have been separated, fractionated, or partially or substantially purified by any suitable technique. The polypeptides disclosed herein can be recombinantly produced using methods known in the art. In some aspects, the CARs of the present disclosure are recombinantly produced. In some aspects, the CARs of the present disclosure are produced by cells, e.g., T cells, following transfection with at least one polynucleotide o vector encoding a CAR of the present disclosure.

[0230] As used herein, the term “fragment” of a polypeptide (e.g., a Ig hinge) refers to an amino acid sequence of a polypeptide that is shorter than the naturally-occurring sequence, N- and/or C-terminally deleted or any part of the polypeptide deleted in comparison to the naturally occurring polypeptide. Thus, a fragment does not necessary need to have only N- and/or C-terminal amino acids deleted. A polypeptide in which internal amino acids have been deleted with respect to the naturally occurring sequence is also considered a fragment.

[0231] As used herein, the term “functional fragment” refers to a polypeptide fragment that retains polypeptide function. Accordingly, in some aspects, a functional fragment of an Ig hinge, retains the ability to position an antigen-binding domain (e.g., an scFv) in a CAR at a distance from a target epitope (e.g., a tumor antigen) such that the antigen-binding domain (e.g., an scFv) can effectively interact with the target epitope (e.g., a tumor antigen).

[0232] Whether a Ig hinge fragment is a functional fragment can be assessed by any art known methods to determine the binding of the CAR comprising the spacer to a target antigen, and T-cell activation, including, e.g., Western Blots, FACS analysis, cytokine secretion analyses, cell survival analyses, etc. In certain aspects, a Ig hinge functional fragment is a fragment that when used as a spacer in a CAR, results in a CAR with, e.g., at least about 20%, at least about 25%, at least about 30%, at least about 35%, at least about 40%, at least about 45%, at least about 50%, at least 55%, at least about 60%, at least about 65%, at least about 70%, at least about 75%, at least about 80%, at least about 85%, at least about 90%, at least about 95%, at least about 99%, or about 100% of the activity of a reference CAR. As used herein, the term “reference CAR” refers to a corresponding CAR comprising the same structural components as the tested CAR, but a different spacer (a “reference spacer”). In some aspects, the reference spacer is, e.g., an IgG1 spacer, i.e., a spacer corresponding to the hinge regions of IgG1.

[0233] Using known methods of protein engineering and recombinant DNA technology, variants can be generated to improve or alter the characteristics of the polypeptides. For instance, one or more amino acids can be deleted from the N-terminus or C-terminus of the secreted protein without substantial loss of biological function. Ron et al., J. Biol. Chem. 268: 2984-2988 (1993), incorporated herein by reference in its entirety, reported variant KGF proteins having heparin binding activity even after deleting 3, 8, or 27 amino-terminal amino acid residues. Similarly, interferon gamma exhibited up to ten times higher activity after deleting 8-10 amino acid residues from the carboxy terminus of this protein. (Dobeli et al., J. Biotechnology 7:199-216 (1988), incorporated herein by reference in its entirety.)

[0234] Moreover, ample evidence demonstrates that variants often retain a biological activity similar to that of the naturally occurring protein. For example, Gayle and coworkers (J. Biol. Chem 268:22105-22111 (1993), incorporated herein by reference in its entirety) conducted extensive mutational analysis of human cytokine IL-1a. They used random mutagenesis to generate over 3,500 individual IL-la mutants that averaged 2.5 amino acid changes per variant over the entire length of the molecule. Multiple mutations were examined at every possible amino acid position. The investigators found that “[m]ost of the molecule could be altered with little effect on either [binding or biological activity].” (See Abstract.) In fact, only 23 unique amino acid sequences, out of more than 3,500 nucleotide sequences examined, produced a protein that significantly differed in activity from wild-type.

[0235] As stated above, variants or derivatives include, e.g., modified polypeptides. In some aspects, variants or derivatives of, e.g., polypeptides, polynucleotides, lipids, glycoproteins, are the result of chemical modification and/or endogenous modification. In some aspects, variants or derivatives are the result of in vivo modification. In some aspects, variants or derivatives are the result of in vitro modification. In yet other aspects, variant or derivatives are the result of intracellular modification in producer cells, e.g., T cells.

[0236] Modifications present in variants and derivatives include, e.g., acetylation, acylation, ADP-ribosylation, amidation, covalent attachment of flavin, covalent attachment of a heme moiety, covalent attachment of a nucleotide or nucleotide derivative, covalent attachment of a lipid or lipid derivative, covalent attachment of phosphotidylinositol, cross-linking, cyclization, disulfide bond formation, demethylation, formation of covalent cross-links, formation of cysteine, formation of pyroglutamate, formylation, gamma-carboxylation, glycosylation, GPI anchor formation, hydroxylation, iodination, methylation, myristoylation, oxidation, pegylation (Mei et al., Blood 116:270-79 (2010), which is incorporated herein by reference in its entirety), proteolytic processing, phosphorylation, prenylation, racemization, selenoylation, sulfation, transfer-RNA mediated addition of amino acids to proteins such as arginylation, and ubiquitination.

[0237] The term “signaling domain” refers to the functional portion of a protein which acts by transmitting information within the cell to regulate cellular activity via defined signaling pathways by generating second messengers or functioning as effectors by responding to such messengers.

[0238] An “intracellular signaling domain,” as the term is used herein, refers to an intracellular portion of a molecule. The intracellular signaling domain can generate a signal that promotes an immune effector function of the CAR containing cell, e.g., a CART cell. Examples of immune effector function, e.g., in a CART cell, include cytolytic activity and helper activity, including the secretion of cytokines. In some aspects, the intracellular signal domain is the portion of the protein which transduces the effector function signal and directs the cell to perform a specialized function. While the entire intracellular signaling domain can be employed, in many cases it is not necessary to use the entire chain. To the extent that a truncated portion of the intracellular signaling domain is used, such truncated portion can be used in place of the intact chain as long as it transduces the effector function signal. The term intracellular signaling domain is thus meant to include any truncated portion of the intracellular signaling domain sufficient to transduce the effector function signal.

[0239] In an embodiment, the intracellular signaling domain can comprise a primary intracellular signaling domain. Exemplary primary intracellular signaling domains include those derived from the molecules responsible for primary stimulation, or antigen dependent simulation. In an embodiment, the intracellular signaling domain can comprise a costimulatory intracellular domain. Exemplary costimulatory intracellular signaling domains include those derived from molecules responsible for costimulatory signals, or antigen independent stimulation. For example, in the case of a CAR T, a primary intracellular signaling domain can comprise a cytoplasmic sequence of a T cell receptor, and a costimulatory intracellular signaling domain can comprise cytoplasmic sequence from co-receptor or costimulatory molecule.

[0240] A primary intracellular signaling domain can comprise a signaling motif which is known as an immunoreceptor tyrosine-based activation motif or ITAM. Examples of ITAM containing primary cytoplasmic signaling sequences include, but are not limited to, those derived from CD3 zeta, FcR gamma, common FcR gamma (FCER1G), Fc gamma RIIa, FcR beta (Fc Epsilon Rib), CD3 gamma, CD3 delta, CD3 epsilon, CD22, CD79a, CD79b, CD278 (ICOS), FcεRI, CD66d, CD32, DAP10 and DAP12.

[0241] The terms “covalently linked,” “fused,” and grammatical variants thereof are used interchangeably and refer to a first moiety, e.g., a first amino acid sequence or nucleotide sequence, covalently or non-covalently joined to a second moiety, e.g., a second amino acid sequence or nucleotide sequence, respectively. The first moiety can be directly joined or juxtaposed to the second moiety or alternatively an intervening moiety can covalently join the first moiety to the second moiety. The term “linked” means not only a fusion of a first moiety to a second moiety at the C-terminus or the N-terminus, but also includes insertion of the whole first moiety (or the second moiety) into any two points, e.g., amino acids, in the second moiety (or the first moiety, respectively). In some aspects, the first moiety is linked to a second moiety by a peptide bond or a linker. The first moiety can be linked to a second moiety by a phosphodiester bond or a linker. The linker can be a peptide or a polypeptide (for polypeptide chains) or a nucleotide or a nucleotide chain (for nucleotide chains) or any chemical moiety (for polypeptide or polynucleotide chains or any chemical molecules).

[0242] As used herein, the term “pharmaceutical composition” refers to one or more of the compounds described herein, such as, e.g., a CAR of the present disclosure or a cell expressing a CAR of the present disclosure, mixed or intermingled with, or suspended in one or more other chemical components, such as pharmaceutically-acceptable carriers and excipients. One purpose of a pharmaceutical composition is to facilitate administration of preparations of, e.g., cell expressing a CAR of the present disclosure to a subject.

[0243] The terms “excipient” and “carrier” are used interchangeably and refer to an inert substance added to a pharmaceutical composition to further facilitate administration of a compound, e.g., a CAR of the present disclosure.

[0244] The terms “pharmaceutically-acceptable carrier,” “pharmaceutically-acceptable excipient,” and grammatical variations thereof, encompass any of the agents approved by a regulatory agency of the U.S. Federal government or listed in the U.S. Pharmacopeia for use in animals, including humans, as well as any carrier or diluent that does not cause the production of undesirable physiological effects to a degree that prohibits administration of the composition to a subject and does not abrogate the biological activity and properties of the administered compound. Included are excipients and carriers that are useful in preparing a pharmaceutical composition and are generally safe, non-toxic, and desirable.

[0245] The terms “subject,” “patient,” “individual,” and “host,” and variants thereof are used interchangeably herein and refer to any mammalian subject, including without limitation, humans, domestic animals (e.g., dogs, cats and the like), farm animals (e.g., cows, sheep, pigs, horses and the like), and laboratory animals (e.g., monkey, rats, mice, rabbits, guinea pigs and the like) for whom diagnosis, treatment, or therapy is desired, particularly humans. The methods described herein are applicable to both human therapy and veterinary applications.

[0246] As used herein, the phrase “subject in need thereof” includes subjects, such as mammalian subjects, that would benefit from administration of a CAR of the present disclosure, e.g., to improve hemostasis.

[0247] The terms “treat,” “treatment,” or “treating,” as used herein refers to, e.g., the reduction in severity of a disease or condition; the reduction in the duration of a disease course; the amelioration or elimination of one or more symptoms associated with a disease or condition; the provision of beneficial effects to a subject with a disease or condition, without necessarily curing the disease or condition. The term also include prophylaxis or prevention of a disease or condition or its symptoms thereof. In some aspects, the term “treating” or “treatment” means inducing an immune response in a subject against an antigen.

[0248] The terms “prevent,” “preventing,” and variants thereof as used herein, refer partially or completely delaying onset of an disease, disorder and/or condition; partially or completely delaying onset of one or more symptoms, features, or clinical manifestations of a particular disease, disorder, and/or condition; partially or completely delaying onset of one or more symptoms, features, or manifestations of a particular disease, disorder, and/or condition; partially or completely delaying progression from a particular disease, disorder and/or condition; and/or decreasing the risk of developing pathology associated with the disease, disorder, and/or condition. In some aspects, preventing an outcome is achieved through prophylactic treatment.

[0249] As used herein the term “therapeutically effective amount” is the amount of reagent or pharmaceutical compound comprising a CAR of the present disclosure that is sufficient to a produce a desired therapeutic effect, pharmacologic and/or physiologic effect on a subject in need thereof.

[0250] A therapeutically effective amount can be a “prophylactically effective amount” as prophylaxis can be considered therapy. As used herein, “prophylactic” refers to a therapeutic or course of action used to prevent the onset of a disease or condition, or to prevent or delay a symptom associated with a disease or condition. As used herein, a “prophylaxis” refers to a measure taken to maintain health and prevent the onset of a disease or condition, or to prevent or delay a symptom associated with a disease or condition.

### II. CARs with Ig Derived Spacers

[0251] The present disclosure provides Immunoglobulin (Ig) derived CAR spacers (e.g., derived from hinge regions or loop regions) that are useful for cells expressing one or more chimeric antigen receptors. These CAR spacers comprise, e.g., IgAQ1, IgA2, IgG1, IgG2, IgG3, IgG4, IgD, IgE, or IgM hinge regions, fragments thereof (alone or capped by additional sequences, e.g., CH1 or CH2 regions sequences), or combinations of fragments from IgAQ1, IgA2, IgG1, IgG2, IgG3, IgG4, IgD, IgE, or IgM hinge regions. In some aspects, the CAR spacers comprise, e.g., IgAQ1, IgA2, IgG1, IgG2, IgG3, IgG4, IgD, IgE, or IgM constant domain loop regions, fragments thereof (alone or capped by additional sequences, e.g., from adjacent P-strands), or combinations of fragments from IgAQ1, IgA2, IgG1, IgG2, IgG3, IgG4, IgD, IgE, or IgM loop regions. In some aspects, the CAR spacer of the present disclosure comprise hinge region derived sequences, loop region derived sequences, or combinations thereof.

[0252] Accordingly, the present disclosures provide polynucleotides encoding a CAR comprising, e.g., (i) an antigen-binding domain, (ii) a transmembrane domain, (iii) an intracellular domain, and (iv) a CAR spacer comprising an amino acid sequence derived from a human immunoglobulin (Ig) hinge region and/or loop region (i.e., a CAR spacer of the present disclosure), and optionally a linker (e.g, a gly-ser rich linker) wherein the spacer is located between the antigen-binding domain and the transmembrane domain. In some aspects, the present disclosure provides a recombinant nucleic acid construct comprising a transgene encoding a CAR of the present disclosure. The present disclosure also provides a CAR encoded by one or more of the polynucleotide sequences or the vectors disclosed herein. In some aspects, the CAR of present disclosure is designed as a standard CAR, a split CAR, an off-switch CAR, an on-switch CAR, a first-generation CAR, a second-generation CAR, a third-generation CAR, a fourth-generation CAR, or a fifth generation CAR.

[0253] The term “CAR spacer” as used herein refers to a polypeptide sequence which is capable of covalently linking together two spaced moieties: an antigen-binding domain, and the transmembrane domain of the CAR.

[0254] The terms “CAR spacer of the present disclosure” and “Ig derived CAR spacer” are used interchangeably to refers to (i) a “hinge region derived CAR spacer,” i.e., a CAR spacer comprising an amino acid sequence derived from a hinge region located between the CH1 and CH2 constant domains of a human immunoglobulin, e.g., IgAQ1, IgA2, IgG1, IgG2, IgG3, IgG4, IgD, IgE, or IgM, and optionally one or more amino acids from an adjacent CH1 and/or CH2 domain, or a combination thereof (e.g., several concatenated hinge region derived CAR spacer); (ii) a “loop region derived CAR spacer,” i.e., a CAR spacer comprising an amino acid sequence derived from a loop region of a constant domain of a human immunoglobulin, e.g., IgAQ1, IgA2, IgG1, IgG2, IgG3, IgG4, IgD, IgE, or IgM, and optionally one or more amino acids from an adjacent P-strand, or a combination thereof (e.g., several concatenated loop region derived CAR spacers); or, (iii) a combination thereof (e.g., two or more concatenated hinge region derived CAR spacers and loop region derived CAR spacers).

[0255] In some aspects, the term CAR spacer of the present disclosure refers to a subsequence of an immunoglobulin heavy chain selected the group consisting of human IgAQ1 (Uniprot: P01876, IGHA1_HUMAN, immunoglobulin heavy constant alpha 1; SEQ ID NO: 4994), human IgA2 (Uniprot P01877, IGHA2_HUMAN, immunoglobulin heavy constant alpha 2; SEQ ID NO: 4995), murine IgG2A (Uniprot P01665, GCAM_MOUSE, immunoglobulin gamma 2 Å chain C region; SEQ ID NO: 4993), human IgG1 (Uniprot P01857, IGHG1_HUMAN, immunoglobulin heavy constant gamma 1; SEQ ID NO: 4998), human IgG2 (Uniprot P01859, IGHG2_HUMAN, immunoglobulin heavy constant gamma 2; SEQ ID NO: 4999), human IgG3 (Uniprot P01860, IGHG3_HUMAN, immunoglobulin heavy constant gamma 3; SEQ ID NO: 5000), human IgG4 (Uniprot P01861, IGHG4, immunoglobulin heavy constant gamma 4; SEQ ID NO: 5001), human IgD (Uniprot P01880, IGHD_HUMAN, immunoglobulin heavy constant delta; SEQ ID NO: 4996), human IgE (Uniprot P01854, IGHE_HUMAN, immunoglobulin heavy constant chain epsilon; SEQ ID NO: 4997), or IgM (Uniprot P01871, IGHM_HUMAN, immunoglobulin heavy constant mu; SEQ ID NO: 5002), wherein the subsequence comprises the CH1-CH2 hinge region or a portion thereof. In some aspects, the subsequence further comprises an adjacent portion of a CH1 and/or CH2 constant domain.

[0256] In some aspects, the term CAR spacer of the present disclosure refers to a subsequence of an immunoglobulin heavy chain selected the group consisting of human IgAQ1 (Uniprot: P01876, IGHA1_HUMAN, immunoglobulin heavy constant alpha 1; SEQ ID NO: 4994), human IgA2 (Uniprot P01877, IGHA2_HUMAN, immunoglobulin heavy constant alpha 2; SEQ ID NO: 4995), murine IgG2A (Uniprot P01665, GCAM_MOUSE, immunoglobulin gamma 2 Å chain C region; SEQ ID NO: 4993), human IgG1 (Uniprot P01857, IGHG1_HUMAN, immunoglobulin heavy constant gamma 1; SEQ ID NO: 4998), human IgG2 (Uniprot P01859, IGHG2_HUMAN, immunoglobulin heavy constant gamma 2; SEQ ID NO: 4999), human IgG3 (Uniprot P01860, IGHG3_HUMAN, immunoglobulin heavy constant gamma 3; SEQ ID NO: 5000), human IgG4 (Uniprot P01861, IGHG4, immunoglobulin heavy constant gamma 4; SEQ ID NO: 5001), human IgD (Uniprot P01880, IGHD_HUMAN, immunoglobulin heavy constant delta; SEQ ID NO: 4996), human IgE (Uniprot P01854, IGHE_HUMAN, immunoglobulin heavy constant chain epsilon; SEQ ID NO: 4997), or IgM (Uniprot P01871, IGHM_HUMAN, immunoglobulin heavy constant mu; SEQ ID NO: 5002), wherein the subsequence comprises a loop region from a constant domain or a portion thereof. In some aspects, the subsequence further comprises an adjacent portion of a P-strand.

[0257] In some aspects, the CAR spacer comprises a subsequence consisting of 4, 5, 6, 7, 8, 9, 10, 11, 12, 13, 14, 15, 16, 17, 18, 19, 20, 21, 22, 23, 24, 25, 26, 27, 28, 29, 30, 31, 32, 33, 34, 35, 36, 37, 38, 39, 40, 41, 42, 43, 44, 45, 46, 47, 48, 49, 50, 51, 52, 53, 54, 55, 56, 57, 58, 59, 60, 61, 62, 63, 64, 65, 66, 67, 68, 69, 70, 71, 72, 73, 74, 75, 76, 77, 78, 79, or 80 amino acids from a hinge region of an immunoglobulin of SEQ ID NO: 4993-5002; or a combination thereof.

[0258] In some aspects, the CAR spacer comprises a subsequence consisting of 4, 5, 6, 7, 8, 9, 10, 11, 12, 13, 14, 15, 16, 17, 18, 19, 20, 21, 22, 23, 24, 25, 26, 27, 28, 29, 30, 31, 32, 33, 34, 35, 36, 37, 38, 39, 40, 41, 42, 43, 44, 45, 46, 47, 48, 49, 50, 51, 52, 53, 54, 55, 56, 57, 58, 59, 60, 61, 62, 63, 64, 65, 66, 67, 68, 69, 70, 71, 72, 73, 74, 75, 76, 77, 78, 79, or 80 amino acids from a hinge region of an immunoglobulin of SEQ ID NO: 4993-5002, wherein the subsequence further comprises 1, 2, 3, 4, 5, 6, 7, 8, 9, or 10 contiguous amino acids from the CH1 region adjacent to the hinge region subsequence; or a combination thereof.

[0259] In some aspects, the CAR spacer comprises a subsequence consisting of 4, 5, 6, 7, 8, 9, 10, 11, 12, 13, 14, 15, 16, 17, 18, 19, 20, 21, 22, 23, 24, 25, 26, 27, 28, 29, 30, 31, 32, 33, 34, 35, 36, 37, 38, 39, 40, 41, 42, 43, 44, 45, 46, 47, 48, 49, 50, 51, 52, 53, 54, 55, 56, 57, 58, 59, 60, 61, 62, 63, 64, 65, 66, 67, 68, 69, 70, 71, 72, 73, 74, 75, 76, 77, 78, 79, or 80 amino acids from a hinge region of an immunoglobulin of SEQ ID NO: 4993-5002, wherein the subsequence further comprises 1, 2, 3, 4, 5, 6, 7, 8, 9, or 10 contiguous amino acids from the CH2 region adjacent to the hinge region subsequence; or a combination thereof.

[0260] In some aspects, the CAR spacer comprises a subsequence consisting of 4, 5, 6, 7, 8, 9, 10, 11, 12, 13, 14, 15, 16, 17, 18, 19, 20, 21, 22, 23, 24, 25, 26, 27, 28, 29, 30, 31, 32, 33, 34, 35, 36, 37, 38, 39, 40, 41, 42, 43, 44, 45, 46, 47, 48, 49, 50, 51, 52, 53, 54, 55, 56, 57, 58, 59, 60, 61, 62, 63, 64, 65, 66, 67, 68, 69, 70, 71, 72, 73, 74, 75, 76, 77, 78, 79, or 80 amino acids from a hinge region of an immunoglobulin of SEQ ID NO: 4993-5002, wherein the subsequence further comprises 1, 2, 3, 4, 5, 6, 7, 8, 9, or 10 contiguous amino acids from the CH1 region adjacent to the hinge region subsequence and 1, 2, 3, 4, 5, 6, 7, 8, 9, or 10 contiguous amino acids from the CH2 region adjacent to the hinge region subsequence; or a combination thereof.

[0261] In some aspects, the CAR spacer comprises a hinge region derived spacer and further comprises a glycine-serine flexible linker, e.g., a Gly-Ser of SEQ ID NO: 4818 or 5088.

[0262] In some aspects, the CAR spacer comprises a subsequence consisting of 4, 5, 6, 7, 8, 9, 10, 11, 12, 13, 14, 15, 16, 17, 18, 19, 20, 21, 22, 23, 24, 25, 26, 27, 28, 29, 30, 31, 32, 33, 34, 35, 36, 37, 38, 39, 40, 41, 42, 43, 44, 45, 46, 47, 48, 49, 50, 51, 52, 53, 54, 55, 56, 57, 58, 59, 60, 61, 62, 63, 64, 65, 66, 67, 68, 69, 70, 71, 72, 73, 74, 75, 76, 77, 78, 79, or 80 amino acids from a loop region of a constant domain (e.g., CH1, CH2 or CH3) of an immunoglobulin of SEQ ID NO: 4993-5002; or a combination thereof.

[0263] In some aspects, the CAR spacer comprises a subsequence consisting of 4, 5, 6, 7, 8, 9, 10, 11, 12, 13, 14, 15, 16, 17, 18, 19, 20, 21, 22, 23, 24, 25, 26, 27, 28, 29, 30, 31, 32, 33, 34, 35, 36, 37, 38, 39, 40, 41, 42, 43, 44, 45, 46, 47, 48, 49, 50, 51, 52, 53, 54, 55, 56, 57, 58, 59, 60, 61, 62, 63, 64, 65, 66, 67, 68, 69, 70, 71, 72, 73, 74, 75, 76, 77, 78, 79, or 80 amino acids from a loop region of a constant domain (e.g., CH1, CH2 or CH3) of an immunoglobulin of SEQ ID NO: 4993-5002, wherein the subsequence further comprises 1, 2, 3, 4, 5, 6, 7, 8, 9, or 10 contiguous amino acids from a P-strand adjacent to the C-terminus of the loop region subsequence; or a combination thereof.

[0264] In some aspects, the CAR spacer comprises a subsequence consisting of 4, 5, 6, 7, 8, 9, 10, 11, 12, 13, 14, 15, 16, 17, 18, 19, 20, 21, 22, 23, 24, 25, 26, 27, 28, 29, 30, 31, 32, 33, 34, 35, 36, 37, 38, 39, 40, 41, 42, 43, 44, 45, 46, 47, 48, 49, 50, 51, 52, 53, 54, 55, 56, 57, 58, 59, 60, 61, 62, 63, 64, 65, 66, 67, 68, 69, 70, 71, 72, 73, 74, 75, 76, 77, 78, 79, or 80 amino acids from a loop region of a constant domain (e.g., CH1, CH2 or CH3) of an immunoglobulin of SEQ ID NO: 4993-5002, wherein the subsequence further comprises 1, 2, 3, 4, 5, 6, 7, 8, 9, or 10 contiguous amino acids from a P-strand adjacent to the N-terminus of the loop region subsequence; or a combination thereof.

[0265] In some aspects, the CAR spacer comprises a subsequence consisting of 4, 5, 6, 7, 8, 9, 10, 11, 12, 13, 14, 15, 16, 17, 18, 19, 20, 21, 22, 23, 24, 25, 26, 27, 28, 29, 30, 31, 32, 33, 34, 35, 36, 37, 38, 39, 40, 41, 42, 43, 44, 45, 46, 47, 48, 49, 50, 51, 52, 53, 54, 55, 56, 57, 58, 59, 60, 61, 62, 63, 64, 65, 66, 67, 68, 69, 70, 71, 72, 73, 74, 75, 76, 77, 78, 79, or 80 amino acids from a loop region of a constant domain (e.g., CH1, CH2 or CH3) of an immunoglobulin of SEQ ID NO: 4993-5002, wherein the subsequence further comprises 1, 2, 3, 4, 5, 6, 7, 8, 9, or 10 contiguous amino acids from a P-strand adjacent to the C-terminus of the loop region subsequence; and 1, 2, 3, 4, 5, 6, 7, 8, 9, or 10 contiguous amino acids from the a P-strand adjacent to N-terminus of the loop region subsequence.

[0266] In some aspects, the CAR spacer comprises a loop region derived spacer and further comprises a glycine-serine flexible linker, e.g., a Gly-Ser of SEQ ID NO: 4818 or 5088.

[0267] In some aspects, a CAR spacer derived from a hinge region disclosed herein comprises, consists, or consist essentially of an amino acid sequence of having at least about 70%, at least about 75%, at least about 80%, at least about 85%, at least about 90%, at least about 95%, at least about 96%, at least about 97%, at least about 98%, at least about 99%, or about 100% sequence identity to a sequence selected from the group consisting of SEQ ID NOS: 4830-4842, and 4844-4859.

[0268] In some aspects, a CAR spacer derived from a loop region disclosed herein comprises, consists, or consist essentially of an amino acid sequence having at least about 70%, at least about 75%, at least about 80%, at least about 85%, at least about 90%, at least about 95%, at least about 96%, at least about 97%, at least about 98%, at least about 99%, or about 100% sequence identity to the sequence set forth in SEQ ID NO: 4843 (Spacer 15).

### II.A. IgD Derived CAR Spacer

[0269] Immunoglobulin D (IgD) is an antibody isotype that makes up about 1% of proteins in the plasma membranes of immature B-lymphocytes where it is usually co-expressed with another cell surface antibody called IgM. Structurally, IgD are similar to IgG.

[0270] As used herein, the term “IgD hinge” refers to an amino sequence located between the CH1 region and CH2 regions of the heavy chain of a IgD. IgD heavy chains contain a long hinge region encoded by two exons located between amino acid positions 99 and 162. One exon encodes hinge subregion 1 (SEQ ID NO: 861) and the second exon encodes hinge subregion 2 (SEQ ID NO: 1287). In some aspects, of the present disclosure, the “IgD hinge” is an extended IgD comprising, i.e., a sequence comprising the 64 amino acids IgD hinge core (subregions 1 and 2) plus a 13 amino acids long C-terminal CH2 fragment of SEQ ID NO:2143. Thus, a “full length IgD hinge” as defined in the present application comprises the 77 amino acids long sequence of SEQ ID NO: 1.

[0271] As used herein, the term “IgD hinge derived CAR spacer” comprises, e.g., spacer comprising IgD hinge subregion 1 and fragments thereof, IgD hinge subregion 2 and fragments thereof, fragments of a full length IgD hinge of SEQ ID NO: 1, and variants thereof comprising 1, 2, 3, 4, 5 or more CH1 region and/or CH2 region amino acids.

[0272] In some aspects, an IgD hinge derived CAR spacer of the present disclosure comprises at least five, six, or seven consecutive amino acids of SEQ ID NO: 1. In some aspects, the IgD hinge derived spacer comprises at least five, six, or seven consecutive amino acids of SEQ ID NO: 861, SEQ ID NO: 1287, and/or SEQ ID ON: 2143.

[0273] In some aspects, a CAR comprising an IgD hinge derived spacer is capable of inducing an increased Interferon-7 level, e.g., at least 10%, at least about 20%, at least about 30%, at least about 40%, at least about 50%, at least about 60%, at least about 70%, at least about 80%, at least about 90%, at least about 100%, at least about 120%, at least about 150%, compared to a CAR comprising a reference spacer, e.g., a reference IgG4 spacer (e.g., a spacer of SEQ ID NO: 4911).

[0274] In some aspects, a CAR comprising an IgD hinge derived spacer is capable of inducing an increased Interleukin-2 level, e.g., at least 10%, at least about 20%, at least about 30%, at least about 40%, at least about 50%, at least about 60%, at least about 70%, at least about 80%, at least about 90%, at least about 100%, at least about 120%, at least about 150%, compared to a CAR comprising a reference spacer, e.g., a reference IgG4 spacer (e.g., a spacer of SEQ ID NO: 4911). As used herein, the term “reference spacer” refers to a spacer present in a CAR prior to being optimized by the replacement of the original spacer with a spacer disclosed herein. In some aspects, the reference spacer is an IgG4 spacer (e.g., a spacer of SEQ ID NO: 4911). In some aspects, the reference spacer can be any spacer known in the art, e.g., a spacer disclosed in any of the documents incorporated by reference in the present disclosure.

[0275] In some aspects, a CAR comprising an IgD hinge derived spacer is capable of inducing an increased TNF-α level, e.g., at least 10%, at least about 20%, at least about 30%, at least about 40%, at least about 50%, at least about 60%, at least about 70%, at least about 80%, at least about 90%, at least about 10000, at least about 120%, at least about 150%, compared to a CAR comprising a reference spacer, e.g., a reference IgG4 spacer (e.g., a spacer of SEQ ID NO: 4911).

[0276] In some aspects, an IgD hinge derived CAR spacer of the present disclosure comprises an amino acid sequence having at least about 700%, at least about 7500 at least about 800%, at least about 85%, at least about 90%, at least about 95%, at least about 96%, at least about 97%, at least about 98%, at least about 99%, or about 100% sequence identity to the sequence set forth in SEQ ID NO: 1. In some aspects, the IgD hinge derived spacer comprises an amino acid sequence having at least about 70%, at least about 75%, at least about 80%, at least about 85%, at least about 90%, at least about 95% at least about 96%, at least about 97% at least about 98%, at least about 99% or about 100% sequence identity to SEQ ID NO: 861, SEQ ID NO: 1287, and/or SEQ ID ON: 2143.

[0277] In some aspects, an IgD hinge derived CAR spacer of the present disclosure comprises, consists, or consist essentially of a sequence disclosed in TABLE 1.

TABLE 1
IgD derived spacers. SEQ ID NO: 1 is full length IgD hinge.

| Length | SEQ ID | Length | SEQ ID | Length | SEQ ID |
|---|---|---|---|---|---|
| 77 (full length) | 1 | 76 | 2-3 | 75 | 4-6 |
| 74 | 7-10 | 73 | 11-15 | 72 | 16-21 |
| 71 | 22-28 | 70 | 29-36 | 69 | 37-45 |
| 68 | 46-55 | 67 | 56-66 | 66 | 67-78 |
| 65 | 79-91 | 64 | 92-105 | 63 | 106-120 |
| 62 | 121-136 | 61 | 137-153 | 60 | 154-171 |
| 59 | 172-190 | 58 | 191-210 | 57 | 211-231 |
| 56 | 232-253 | 55 | 254-276 | 54 | 277-300 |
| 53 | 301-325 | 52 | 326-351 | 51 | 352-378 |
| 50 | 379-406 | 49 | 407-435 | 48 | 436-465 |
| 47 | 466-496 | 46 | 497-528 | 45 | 529-561 |
| 44 | 562-595 | 43 | 596-630 | 42 | 631-666 |
| 41 | 667-703 | 40 | 704-741 | 39 | 742-780 |
| 38 | 781-820 | 37 | 821-861 | 36 | 862-903 |
| 35 | 904-946 | 34 | 947-989 | 33 | 990-1034 |
| 32 | 1035-1080 | 31 | 1081-1126 | 30 | 1127-1174 |
| 29 | 1175-1223 | 28 | 1124-1273 | 27 | 1274-1324 |
| 26 | 1325-1376 | 25 | 1377-1429 | 24 | 1430-1483 |
| 23 | 1484-1538 | 22 | 1539-1594 | 21 | 1595-1651 |
| 20 | 1652-1709 | 19 | 1710-1768 | 18 | 1769-1828 |
| 17 | 1829-1889 | 16 | 1980-1951 | 15 | 1952-2014 |
| 14 | 2015-2078 | 13 | 2079-2043 | 12 | 2144-2209 |
| 11 | 2210-2276 | 10 | 2277-2344 | 9 | 2345-2413 |
| 8 | 2414-2473 | 7 | 2484-2559 | | |

[0278] In some aspects, the spacer comprises an amino acid sequence having at least about 70%, at least about 75%, at least about 80%, at least about 85%, at least about 90%, at least about 95%, at least about 96%, at least about 97%, at least about 98%, at least about 99%, or about 100% sequence identity to a sequence selected from the group consisting of SEQ ID NO: 2015; SEQ ID NO: 1889; SEQ ID NO: 1768; SEQ ID NO: 1; and any combination thereof.

[0279] In some aspects, the spacer comprises an amino acid sequence having at least about 70%, at least about 75%, at least about 80%, at least about 85%, at least about 90%, at least about 95%, at least about 96%, at least about 97%, at least about 98%, at least about 99%, or about 100% sequence identity to the sequence set forth in SEQ ID NO: 2015.

[0280] In some aspects, the spacer comprises an amino acid sequence having at least about 70%, at least about 75%, at least about 80%, at least about 85%, at least about 90%, at least about 95%, at least about 96%, at least about 97%, at least about 98%, at least about 99%, or about 100% sequence identity to the sequence set forth in SEQ ID NO: 1889.

[0281] In some aspects, the spacer comprises an amino acid sequence having at least about 70%, at least about 75%, at least about 80%, at least about 85%, at least about 90%, at least about 95%, at least about 96%, at least about 97%, at least about 98%, at least about 99%, or about 100% sequence identity to the sequence set forth in SEQ ID NO: 1.

[0282] In some aspects, the spacer comprises an amino acid sequence having at least about 70%, at least about 75%, at least about 80%, at least about 85%, at least about 90%, at least about 95%, at least about 96%, at least about 97%, at least about 98%, at least about 99%, or about 100% sequence identity to the sequence set forth in SEQ ID NO: 1768.

[0283] In some aspects, the IgD hinge derived CAR spacer of the present disclosure comprises a sequence disclosed in TABLE 1 or a sequence shown anywhere in the present disclosure, further comprising an N-terminal subsequence comprising 1, 2, 3, 4, or 5 IgD CH1 C-terminal domain amino acids from TABLE 2 covalently bound to the N-terminus of the IgD sequence from TABLE 1 or a sequence shown anywhere in the present disclosure.

[0284] In some aspects, the IgD hinge derived CAR spacer of the present disclosure comprises a sequence disclosed in TABLE 1 or a sequence shown anywhere in the present disclosure, further comprising a C-terminal subsequence comprising 1, 2, 3, 4, or 5 IgD CH2 N-terminal domain amino acids from TABLE 2 covalently bound to the C-terminus of the IgD sequence from TABLE 1 or a sequence shown anywhere in the present disclosure.

[0285] In some aspects, the IgD hinge derived CAR spacer of the present disclosure comprises a sequence disclosed in TABLE 1 or a sequence shown anywhere in the present disclosure, further comprising (i) an N-terminal subsequence comprising 1, 2, 3, 4, or 5 IgD CH1 C-terminal domain amino acids from TABLE 2 covalently bound to the N-terminus of the IgD sequence from TABLE 1 or a sequence shown anywhere in the present disclosure, and (ii) a C-terminal subsequence comprising 1, 2, 3, 4, or 5 IgD CH2 N-terminal domain amino acids from TABLE 2 covalently bound to the C-terminus of the IgD sequence from TABLE 1 or a sequence shown anywhere in the present disclosure.

[0286] IgD CH1 and CH2 sequences that can be appended to the N- and/or C-termini of the IgD hinge derived CAR spacer sequences of TABLE 1 or a sequence shown anywhere in the present disclosure are presented in TABLE 2.

TABLE 2
IgD. CH1 and CH2 optional N-terminal
CH1 sequences and C-terminal CH2 sequences
(sequences from Uniprot P01880-1 comprising
1 to 5 amino acids flanking the full IgD hinge
of SEQ ID NO: 1)

| CH1 | | CH2 | |
|---|---|---|---|
| Length | Sequence | Length | Sequence |
| 1 | F | 1 | A |
| 2 | IF | 2 | AV |
| 3 | EIF | 3 | AVQ |
| 4 | KEIF (SEQ | 4 | AVQD (SEQ |
| | ID NO: 4519) | | ID NO: 4521) |
| 5 | KKEIF (SEQ | 5 | AVQDL (SEQ |
| | ID NO: 4520) | | ID NO: 4522) |

### I.B. IgA Hinge Derived CAR Spacer

[0287] IgA is an antibody that pays a crucial role in the immune function of mucous membranes, and represents up to 15% of total immunoglobulins produced throughout the body. IgA has to subclasses: IgAQ1 and IgA2. In IgA2, the heavy and light chains are not linked with disulfide, but with noncovalent bonds.

[0288] The hinge region differs significantly between the two IgA isoforms. The hinge region of IgAQ1 is comprised of 23 residues (SEQ ID NO: 2560) and 5 O-glycosylation sites, while IgA2's hinge region is comprised of 10 residues (SEQ ID NO: 2713) and no sites of glycosylation. Both hinge regions are located at Cys220 on the Ch1 chain and end at Ch2's Pro244.

[0289] As used herein, the “IgAQ1 hinge” refers to the hinge region located between the CH1 and CH2 regions of IgAQ1 having the sequence set forth in SEQ ID NO: 2560.

[0290] As used herein, the term “IgAQ1 hinge derived CAR spacer” comprises, e.g., spacers comprising the full IgAQ1 hinge of SEQ ID NO: 2560 and fragments thereof, and variants thereof comprising 1, 2, 3, 4, 5 or more CH1 region and/or CH2 region amino acids.

[0291] Therefore, in some aspects, an IgAQ1 hinge derived CAR spacer comprises at least five, six, or seven consecutive amino acids of SEQ ID NO: 2560. Therefore, in some aspects, an IgAQ1 hinge derived CAR spacer comprises at least five, six, or seven consecutive amino acids of SEQ ID NO: 2560. In some aspects, the IgAQ1 hinge derived CAR spacer comprises an amino acid sequence having at least about 70%, at least about 75%, at least about 80%, at least about 85%, at least about 90%, at least about 95%, at least about 96%, at least about 97%, at least about 98%, at least about 99%, or about 100% sequence identity to the sequence set forth in SEQ ID NO: 2560.

[0292] In some aspects, a CAR comprising an IgAQ1 hinge derived spacer is capable of inducing an increased Interferon-7 level, e.g., at least 10%, at least about 20%, at least about 30%, at least about 40%, at least about 50%, at least about 60%, at least about 70%, at least about 80%, at least about 90%, at least about 100%, at least about 120%, at least about 150%, compared to a CAR comprising a reference spacer, e.g., a reference IgG4 spacer (e.g., a spacer of SEQ ID NO: 4911).

[0293] In some aspects, a CAR comprising an IgAQ1 hinge derived spacer is capable of inducing an increased Interleukin-2 level, e.g., at least 10%, at least about 20%, at least about 30%, at least about 40%, at least about 50%, at least about 60%, at least about 70%, at least about 80%, at least about 90%, at least about 100%, at least about 120%, at least about 150%, compared to a CAR comprising a reference spacer, e.g., a reference IgG4 spacer (e.g., a spacer of SEQ ID NO: 4911).

[0294] In some aspects, a CAR comprising an IgAQ1 derived spacer is capable of inducing an increased TNF-α level, e.g., at least 10%, at least about 20%, at least about 30%, at least about 40%, at least about 50%, at least about 60%, at least about 70%, at least about 80%, at least about 90%, at least about 100%, at least about 120%, at least about 150%, compared to a CAR comprising a reference spacer, e.g., a reference IgG4 spacer (e.g., a spacer of SEQ ID NO: 4911).

[0295] As used herein, the term “IgA2 hinge” refers to the IgA2 sequence located between the Cys220 at the C-terminus of the CH1 constant domain of the heavy chain of IgA2 and Pro244 at the N-terminus of the CH2 constant domain of the heavy chain of IgA2. In some aspects, the full IgA2 hinge consists of the sequence set forth in SEQ ID NO: 2713. As used herein, the term “IgA2 hinge” encompasses the hinges of different IgA2 allotypes, e.g., IgA2m, IgA2(ml), IgA2(m2) or IgA2(n). The first Pro in the canonical IgA2 hinge of SEQ ID NO: 2713 disclosed above is an Arg in the IgA2(m2) allotype hinge (i.e., it starts with RV instead of PV). Accordingly, the IgA2 CAR spacers of the present disclosure encompasses also forms in which Proline amino acids corresponding to position 1 of SEQ ID NO: 2713 (e.g., corresponding amino acids present in IgA2 fragments or any IgA2 derived sequences) are replaced with Arginines.

[0296] As used herein, the term “IgA2 derived CAR spacer” comprises, e.g., spacers comprising the full IgA2 hinge of SEQ ID NO: 2713 and fragments thereof, and variants thereof comprising 1, 2, 3, 4, 5 or more CH1 region and/or CH2 region amino acids. In some aspects, an IgA2 derived CAR spacer comprises at least five, six, or seven consecutive amino acids of SEQ ID NO: 4848. In some aspects, an IgA2 derived CAR spacer comprises an amino acid sequence having at least about 70%, at least about 75%, at least about 80%, at least about 85%, at least about 90%, at least about 95%, at least about 96%, at least about 97%, at least about 98%, at least about 99%, or about 100% sequence identity to the sequence set forth in SEQ ID NO: 4848.

[0297] In some aspects, a CAR comprising an IgA2 hinge derived spacer is capable of inducing an increased Interferon-7 level, e.g., at least 10%, at least about 20%, at least about 30%, at least about 40%, at least about 50%, at least about 60%, at least about 70%, at least about 80%, at least about 90%, at least about 100%, at least about 120%, at least about 150%, compared to a CAR comprising a reference spacer, e.g., a reference IgG4 spacer (e.g., a pacer of SEQ ID NO: 4911).

[0298] In some aspects, a CAR comprising an IgA2 hinge derived spacer is capable of inducing an increased Interleukin-2 level, e.g., at least 10%, at least about 20%, at least about 30%, at least about 40%, at least about 50%, at least about 60%, at least about 70%, at least about 80%, at least about 90%, at least about 100%, at least about 120%, at least about 150%, compared to a CAR comprising a reference spacer, e.g., a reference IgG4 spacer (e.g., a pacer of SEQ ID NO: 4911).

[0299] In some aspects, a CAR comprising an IgA2 hinge derived spacer is capable of inducing an increased TNF-α level, e.g., at least 10%, at least about 20%, at least about 30%, at least about 40%, at least about 50%, at least about 60%, at least about 70%, at least about 80%, at least about 90%, at least about 100%, at least about 120%, at least about 150%, compared to a CAR comprising a reference spacer, e.g., a reference IgG4 spacer (e.g., a spacer of SEQ ID NO: 4911).

[0300] In some aspects, an IgA2 derived CAR spacer of the present disclosure can, e.g., have the sequence set forth in SEQ ID NO: 4523 (i.e., an IgA2 hinge sequence with an N-terminal VPC sequence from CH1), SEQ ID NO: 4850, SEQ ID NO: 4524 (i.e, an IgA2 spacer sequence with an N-terminal VPC sequence from CH1 and a C-terminal PR sequence from CH2), or SEQ ID NO: 4525 (i.e, an IgA2 spacer sequence with an N-terminal PC sequence from CH1 and a C-terminal P sequence from CH2), wherein the VCP and PC N-terminal subsequences from SEQ ID NOS:3523, 4524, and 4525 are from the CH1 region and the C-terminal PR and P subsequences from SEQ ID NOS: 4524 and 4525 are from the CH2 region of the IgA2 immunoglobulin.

[0301] In some aspects, an IgAQ1 hinge derived CAR spacer of the present disclosure comprises, consists, or consist essentially of a sequence disclosed in TABLE 3.

TABLE 3
IgA1 derived spacers

| Length | SEQ ID | Length | SEQ ID | Length | SEQ ID |
|---|---|---|---|---|---|
| 23 | 2560 | 22 | 2561-2562 | 21 | 2563-2665 |
| 20 | 2566-2569 | 19 | 2570-2574 | 18 | 2575-2580 |
| 17 | 2581-2587 | 16 | 2588-2595 | 15 | 2596-2604 |
| 14 | 2605-2614 | 13 | 2615-2625 | 12 | 2626-2637 |
| 11 | 2638-2650 | 10 | 2651-2644 | 9 | 2665-2679 |
| 8 | 2680-2695 | 7 | 2696-2712 | | |

[0302] In some aspects, the IgAQ1 hinge derived CAR spacer comprises an amino acid sequence having at least about 70%, at least about 75%, at least about 80%, at least about 85%, at least about 90%, at least about 95%, at least about 96%, at least about 97%, at least about 98%, at least about 99%, or about 100% sequence identity to a sequence selected from the group consisting of SEQ ID NO: 4845; SEQ ID NO: 4846; SEQ ID NO: 4847; SEQ ID NO: 4848; SEQ ID NO: 4849; SEQ ID NO: 4850; SEQ ID NO: 4851; SEQ ID NO: 2560; SEQ ID NO: 4844; and any combination thereof.

[0303] In some aspects, the IgAQ1 hinge derived CAR spacer comprises an amino acid sequence having at least about 70%, at least about 75%, at least about 80%, at least about 85%, at least about 90%, at least about 95%, at least about 96%, at least about 97%, at least about 98%, at least about 99%, or about 100% sequence identity to the sequence set forth in SEQ ID NO: 4847.

[0304] In some aspects, the IgAQ1 hinge derived CAR spacer comprises an amino acid sequence having at least about 70%, at least about 75%, at least about 80%, at least about 85%, at least about 90%, at least about 95%, at least about 96%, at least about 97%, at least about 98%, at least about 99%, or about 100% sequence identity to the sequence set forth in SEQ ID NO: 4845.

[0305] In some aspects, the IgAQ1 hinge derived CAR spacer comprises an amino acid sequence having at least about 70%, at least about 75%, at least about 80%, at least about 85%, at least about 90%, at least about 95%, at least about 96%, at least about 97%, at least about 98%, at least about 99%, or about 100% sequence identity to the sequence set forth in SEQ ID NO: 4846.

[0306] In some aspects, the IgAQ1 hinge derived CAR spacer comprises an amino acid sequence having at least about 70%, at least about 75%, at least about 80%, at least about 85%, at least about 90%, at least about 95%, at least about 96%, at least about 97%, at least about 98%, at least about 99%, or about 100% sequence identity to the sequence set forth in SEQ ID NO: 2560.

[0307] In some aspects, the IgAQ1 hinge derived CAR spacer comprises an amino acid sequence having at least about 70%, at least about 75%, at least about 80%, at least about 85%, at least about 90%, at least about 95%, at least about 96%, at least about 97%, at least about 98%, at least about 99%, or about 100% sequence identity to the sequence set forth in SEQ ID NO: 4844.

[0308] In some aspects, the IgAQ1 hinge derived CAR spacer of the present disclosure comprises a sequence disclosed in TABLE 3 or any IgAQ1 hinge derived CAR spacer disclosed herein, further comprising an N-terminal subsequence comprising 1, 2, 3, 4, or 5 IgAQ1 CH1 C-terminal domain amino acids from TABLE 4 covalently bound to the N-terminus of the IgAQ1 sequence from TABLE 3 or any IgAQ1 hinge derived CAR spacer disclosed herein.

[0309] In some aspects, the IgAQ1 hinge derived CAR spacer of the present disclosure comprises a sequence disclosed in TABLE 3 or any IgAQ1 hinge derived CAR spacer disclosed herein, further comprising a C-terminal subsequence comprising 1, 2, 3, 4, or 5 IgA1 CH2 N-terminal domain amino acids from TABLE 4 covalently bound to the C-terminus of the IgA2 sequence from TABLE 3 or any IgAQ1 hinge derived CAR spacer disclosed herein.

[0310] In some aspects, the IgAQ1 hinge derived CAR spacer of the present disclosure comprises a sequence disclosed in TABLE 3 or any IgAQ1 hinge derived CAR spacer disclosed herein, further comprising (i) an N-terminal subsequence comprising 1, 2, 3, 4, or 5 IgAQ1 CH1 C-terminal domain amino acids from TABLE 4 covalently bound to the N-terminus of the IgAQ1 sequence from TABLE 3 or any IgAQ1 hinge derived CAR spacer disclosed herein, and (ii) a C-terminal subsequence comprising 1, 2, 3, 4, or 5 IgAQ1 CH2 N-terminal domain amino acids from TABLE 4 covalently bound to the C-terminus of the IgD sequence from TABLE 3 or any IgAQ1 hinge derived CAR spacer disclosed herein.

[0311] IgAQ1 CH1 and CH2 sequences that can be appended to the N- and/or C-termini of the IgAQ1 derived CAR spacer sequences of TABLE 3 or any IgAQ1 hinge derived CAR spacer disclosed herein are presented in TABLE 4.

TABLE 4
IgA1. CH1 and CH2 optional N-terminal
CH1 sequences and C-terminal CH2
(sequences from Uniprot P01876 comprising
1 to 5 amino acids flanking the full
IgAl hinge of sequences SEQ ID NO: 2560)

| CH1 | | CH2 | |
|---|---|---|---|
| Length | Sequence | Length | Sequence |
| 1 | C | 1 | P |
| 2 | PC | 2 | PR |
| 3 | VPC | 3 | PRL |
| 4 | TVPC | 4 | PRLS |
| | (SEQ ID | | (SEQ ID |
| | NO: 4526) | | NO: 4528) |
| 5 | VTVPC | 5 | PRLSL |
| | (SEQ ID | | (SEQ ID |
| | NO: 4527) | | NO: 4529) |

[0312] In some aspects, an IgA2 hinge derived CAR spacer of the present disclosure comprises at least five, six, or seven consecutive amino acids of the sequence set forth in SEQ ID NO: 2713. In some aspects, an IgA2 hinge derived CAR spacer of the present disclosure comprises an amino acid sequence having at least about 70%, at least about 75%, at least about 80%, at least about 85%, at least about 90%, at least about 95%, at least about 96%, at least about 97%, at least about 98%, at least about 99%, or about 100% sequence identity to the sequence set forth in SEQ ID NO: 2713.

[0313] In some aspects, an “IgA2 hinge derived CAR spacer” of the present disclosure comprises, consists, or consist essentially of a sequence disclosed in TABLE 5

TABLE 5
IgA2 derived spacers

| Length | SEQ ID | Length | SEQ ID |
|---|---|---|---|
| 10 | 2713 | 9 | 2714-2715 |
| 8 | 2716-2718 | 7 | 2719-2722 |

[0314] In some aspects, the IgA2 hinge derived CAR spacer of the present disclosure comprises a sequence disclosed in TABLE 5 or anywhere in the disclosure, further comprising an N-terminal subsequence comprising 1, 2, 3, 4, or 5 IgA2 CH1 C-terminal domain amino acids from TABLE 6 covalently bound to the N-terminus of the IgA2 sequence from TABLE 5 or anywhere in the disclosure.

[0315] In some aspects, the IgA2 hinge derived CAR spacer of the present disclosure comprises a sequence disclosed in TABLE 5 or anywhere in the disclosure, further comprising a C-terminal subsequence comprising 1, 2, 3, 4, or 5 IgA2 CH2 N-terminal domain amino acids from TABLE 6 covalently bound to the C-terminus of the IgA2 sequence from TABLE 5 or anywhere in the disclosure.

[0316] In some aspects, the IgA2 hinge derived CAR spacer of the present disclosure comprises a sequence disclosed in TABLE 5 or anywhere in the disclosure, further comprising (i) an N-terminal subsequence comprising 1, 2, 3, 4, or 5 IgA2 CH1 C-terminal domain amino acids from TABLE 6 covalently bound to the N-terminus of the IgA2 sequence from TABLE 5 or anywhere in the disclosure, and (ii) a C-terminal subsequence comprising 1, 2, 3, 4, or 5 IgA2 CH2 N-terminal domain amino acids from TABLE 6 covalently bound to the C-terminus of the IgA2 sequence from TABLE 5 or anywhere in the disclosure.

[0317] IgA2 CH1 and CH2 sequences that can be appended to the N- and/or C-termini of the IgA2 derived CAR spacer sequences of TABLE 5 or anywhere in the disclosure are presented in TABLE 6.

[0318] In some aspects, the N-terminal proline of a full length IgA2 hinge of SEQ ID NO:2713 can be replaced with an arginine (see, e.g., Uniprot P01877). Accordingly, in some aspects, a full length IgA2 hinge disclosed herein has the sequence set forth in SEQ ID NO: 4530.

TABLE 6
IgA2. CH1 and CH2 optional N-terminal
CH1 sequences and C-terminal CH2
sequences (sequences from Uniprot P01877
comprising 1 to 5 amino acids flanking
the full IgA2 hinge of SEQ ID NO: 2713)

| CH1 | | CH2 | |
|---|---|---|---|
| Length | Sequences | Length | Sequences |
| 1 | C | 1 | P |
| 2 | PC | 2 | PR |
| 3 | VPC | 3 | PRL |
| 4 | TVPC (SEQ | 4 | PRLS (SEQ |
| | ID NO: 4526) | | ID NO: 2528) |
| 5 | VTVPC (SEQ | 5 | PRLSL (SEQ |
| | ID NO: 4527) | | ID NO: 4529) |

[0319] In some aspects, the IgA2 hinge derived CAR spacer comprises an amino acid sequence having at least about 70%, at least about 75%, at least about 80%, at least about 85%, at least about 90%, at least about 95%, at least about 96%, at least about 97%, at least about 98%, at least about 99%, or about 100% sequence identity to the sequence set forth in SEQ ID NO: 4848.

[0320] In some aspects, the IgA2 hinge derived CAR spacer comprises an amino acid sequence at least about 70%, at least about 75%, at least about 80%, at least about 85%, at least about 90%, at least about 95%, at least about 96%, at least about 97%, at least about 98%, at least about 99%, or about 100% sequence identity to the sequence set forth in SEQ ID NO: 4849.

[0321] In some aspects, the IgA2 hinge derived CAR spacer comprises an amino acid sequence at least about 70%, at least about 75%, at least about 80%, at least about 85%, at least about 90%, at least about 95%, at least about 96%, at least about 97%, at least about 98%, at least about 99%, or about 100% sequence identity to the sequence set forth in SEQ ID NO: 4850.

[0322] In some aspects, the IgA2 hinge derived CAR spacer comprises an amino acid sequence at least about 70%, at least about 75%, at least about 80%, at least about 85%, at least about 90%, at least about 95%, at least about 96%, at least about 97%, at least about 98%, at least about 99%, or about 100% sequence identity to the sequence set forth in SEQ ID NO: 4851.

### II.C. IgG Hinge Derived CAR Spacer

[0323] Of the five immunoglobulin isotypes, immunoglobulin G (IgG) is most abundant in human serum. The four subclasses, IgG1, IgG2, IgG3, and IgG4, which are highly conserved, differ in their constant region, particularly in their hinges and upper CH2 domains. These regions are involved in binding to both IgG-Fc receptors (FcγR) and C1q. As a result, the different subclasses have different effector functions, both in terms of triggering FcγR-expressing cells, resulting in phagocytosis or antibody-dependent cell-mediated cytotoxicity, and activating complement.

[0324] The hinge exon of IgG1 encompasses a very flexible hinge (SEQ ID NO:2723). IgG2 has a shorter hinge than IgG1 (SEQ ID NO:2768). The lower hinge region of IgG2 (actually encoded by the CH2 region) also has a one amino acid deletion (lacking one of the double Glycines found at position 235-6 of the IgG1 lower hinge), resulting in IgG2 having the shortest hinge of all the IgG subclasses. In addition, the hinges of IgG2 are even more rigid due to a poly-proline helix, stabilized by up to four (with some exceptions discussed below) extra inter-heavy chain disulfide bridges. These properties restrict the flexibility of the IgG2 molecule. Similarly, the hinge region of IgG4 (SEQ ID NO: 4453) is also shorter than the IgG1 hinge region. The flexibility of the hinge region of IgG4 is intermediate between that of IgG1 and IgG2. Unlike the IgG2 hinge, the IgG4 hinge contains the double Glycines found at position 235-6 of the IgG1 lower hinge.

[0325] IgG3 has a much longer hinge region than any other IgG subclasses or Ig human isotype, i.e., about four times as long as the IgG1 hinge, containing up to 62 amino acids (including 21 prolines and 11 cysteines), forming a poly-proline helix with limited flexibility (SEQ ID NO:2813). The exact length of the hinge varies between allotypes of IgG3, which apparently has undergone much more evolutionary radiation than the other subclasses. In IgG3, the Fab fragments are relatively far away from the Fc fragment, giving the molecule a greater flexibility. This long hinge of IgG3 is a result of duplications of a hinge exon, encoded by one exon in IgG1, IgG2, and IgG4, but up to four exons in IgG3. One of those exons is common to all IgG3 allotypes, but it also has 1-3 copies of a homologous second type of IgG3-hinge exon. The elongated hinge in IgG3 is also responsible for its higher molecular weight compared to the other subclasses. The difference in hinge flexibility influences the relative orientation and movement of the Fab arms and Fc tail of the IgG antibody.

[0326] In IgG2, structural hinge isomers have been observed as a result of alternative formation of disulfide bonds between the cysteines in the hinge region of the heavy chains and those involved in the formation of disulfide bonds between the light and heavy chain. These isomers were found particularly in IgG2 antibodies with kappa-light chains, but much less for lambda light chains. The major forms are the classical A form, with four disulfide bridges between the two IgG2 heavy chains, and the B form in which one hinge cysteine forms a disulfide bond with the light chain. However, other configurations exist, as these isoforms apparently form independent of each other, giving rise to A/A, B/B, but also A/B isoforms

[0327] Two isomers of IgG4 differing in the disulfide bonding of hinge cysteines coexist. The core hinge of IgG is formed by a CXXC motif, also found in redox-reactive proteins such as thioredoxins. Compared to IgG1, with a relatively rigid CPPC (SEQ ID NO: 4531) motif, intra-chain disulfide bonds are more easily formed between these cysteines found at positions 226 and 229 in IgG4, which possesses a CPSC (SEQ ID NO:4532) core hinge. The result is an observable amount of non-covalently linked half-molecules (consisting of one heavy and one light chain, HL, as opposed to the classical configuration of H₂L₂) in addition to covalently linked inter-chain isomers. An S228P mutant of IgG4, thus with an IgG1-core hinge, does not form half-molecules, which is in agreement with the finding that this species does not occur in IgG1.

[0328] As used herein, the term “IgG1 hinge” refers to the core plus upper hinge of a IgG1 hinge, i.e., the sequence set forth in SEQ ID NO:2723. In some aspects, the IgG1 hinge also comprises the lower hinge (SEQ ID NO:4533) or a subsequence thereof. In some aspects, the subsequence of the IgG1 lower hinge appended to the C-terminus of the IgG1 hinge of SEQ ID NO:2723 or an N-terminal truncation thereof (i.e., a fragment of SEQ ID NO:2723 in which one or more amino acid residues have been removed from its N-terminal region) is selected from the group consisting of A, AP, APE, APEL (SEQ ID NO: 4534), APELL (SEQ ID NO:4535), APELLG (SEQ ID NO:4536), APELLGG (SEQ ID NO:4537), and APELLGGP (SEQ ID NO:4533).

[0329] In some aspects, an IgG1 hinge derived CAR spacer comprises at least five, six, or seven consecutive amino acids of the sequence set forth in SEQ ID NO: 2723 or SEQ ID NO: 4839. In some aspects, the IgG1 hinge derived CAR spacer comprises an amino acid sequence having at least about 70%, at least about 75%, at least about 80%, at least about 85%, at least about 90%, at least about 95%, at least about 96%, at least about 97%, at least about 98%, at least about 99%, or about 100% sequence identity to the sequence set forth in SEQ ID NO: 2723.

[0330] In some aspects, a CAR comprising an IgG1 hinge derived spacer is capable of inducing an increased Interferon-7 level, e.g., at least 10%, at least about 20%, at least about 30%, at least about 40%, at least about 50%, at least about 60%, at least about 70%, at least about 80%, at least about 90%, at least about 100%, at least about 120%, at least about 150%, compared to a CAR comprising a reference spacer, e.g., a reference IgG4 spacer (e.g., a spacer of SEQ ID NO: 4911).

[0331] In some aspects, a CAR comprising an IgG1 hinge derived spacer is capable of inducing an increased Interleukin-2 level, e.g., at least 10%, at least about 20%, at least about 30%, at least about 40%, at least about 50%, at least about 60%, at least about 70%, at least about 80%, at least about 90%, at least about 100%, at least about 120%, at least about 150%, compared to a CAR comprising a reference spacer, e.g., a reference IgG4 spacer (e.g., a spacer of SEQ ID NO: 4911).

[0332] In some aspects, a CAR comprising an IgG1 derived spacer is capable of inducing an increased TNF-α level, e.g., at least 10%, at least about 20%, at least about 30%, at least about 40%, at least about 50%, at least about 60%, at least about 70%, at least about 80%, at least about 90%, at least about 100%, at least about 120%, at least about 150%, compared to a CAR comprising a reference spacer, e.g., a reference IgG4 spacer (e.g., a spacer of SEQ ID NO: 4911).

[0333] In some aspects, the IgG1 hinge derived spacer is not the sequence set forth in SEQ ID NO: 2723. In some aspects, an IgG1 hinge derived CAR spacer comprises at least five, six, or seven consecutive amino acids of SEQ ID NO: 2723, but is not SEQ ID NO: 2723.

[0334] As used herein, the term “IgG1 hinge derived CAR spacer” comprises, e.g., a spacer comprising an IgG1 hinge of SEQ ID NO: 2723 (upper plus core hinge), an IgG1 hinge of SEQ ID NO: 4538 (upper hinge, core hinge, and lower hinge), fragments thereof, and variants thereof comprising 1, 2, 3, 4, 5 or more additional CH1 region and/or CH2 region amino acids. In some aspects, the term IgG1 derived CAR spacer refers to a subsequence of an IgG1 hinge of SEQ ID NO: 4538 (upper hinge, core hinge, and lower hinge), wherein the subsequence comprises 7, 8, 9, 10, 11, 12, 13, 14, 15, 16, 17, 18, 19, 20, 21, or 22 consecutive amino acids from the polypeptide sequence set forth in SEQ ID NO: 4538.

[0335] In some aspects, an “IgG1 hinge derived CAR spacer” of the present disclosure comprises, consists, or consist essentially of a sequence disclosed in TABLE 7.

TABLE 7
IgG1 derived spacers

| Length | SEQ ID | Length | SEQ ID | Length | SEQ ID |
|---|---|---|---|---|---|
| 15 | 2723 | 14 | 2724-2725 | 13 | 2726-2728 |
| 12 | 2729-2732 | 11 | 2733-2737 | 10 | 2738-2743 |
| 9 | 2744-2750 | 8 | 2751-2758 | 7 | 2759-2767 |

[0336] In some aspects, the IgG1 hinge derived CAR spacer comprises an amino acid sequence having at least about 70%, at least about 75%, at least about 80%, at least about 85%, at least about 90%, at least about 95%, at least about 96%, at least about 97%, at least about 98%, at least about 99%, or about 100% sequence identity to the sequence sert forth in SEQ ID NO: 4840.

[0337] In some aspects, the IgG1 hinge derived CAR spacer comprises an amino acid sequence having at least about 70%, at least about 75%, at least about 80%, at least about 85%, at least about 90%, at least about 95%, at least about 96%, at least about 97%, at least about 98%, at least about 99%, or about 100% sequence identity to the sequence set forth in SEQ ID NO: 4839.

[0338] In some aspects, the IgG1 hinge derived CAR spacer comprises an amino acid sequence having at least about 70%, at least about 75%, at least about 80%, at least about 85%, at least about 90%, at least about 95%, at least about 96%, at least about 97%, at least about 98%, at least about 99%, or about 100% sequence identity to the sequence set forth in SEQ ID NO: 4843.

[0339] In some aspects, the IgG1 hinge derived CAR spacer of the present disclosure comprises a sequence disclosed in TABLE 7 or anywhere in the disclosure, further comprising an N-terminal subsequence comprising 1, 2, 3, 4, or 5 IgG1 CH1 C-terminal domain amino acids from TABLE 8 covalently bound to the N-terminus of the IgG1 sequence from TABLE 7 or anywhere in the disclosure.

[0340] In some aspects, the IgG1 hinge derived CAR spacer of the present disclosure comprises a sequence disclosed in TABLE 7 or anywhere in the disclosure, further comprising a C-terminal subsequence comprising 1, 2, 3, 4, or 5 IgG1 CH2 N-terminal domain amino acids from TABLE 8 covalently bound to the C-terminus of the IgG1 sequence from TABLE 7 or anywhere in the disclosure.

[0341] In some aspects, the IgG1 hinge derived CAR spacer of the present disclosure comprises a sequence disclosed in TABLE 7 or anywhere in the disclosure, further comprising (i) an N-terminal subsequence comprising 1, 2, 3, 4, or 5 IgG1 CH1 C-terminal domain amino acids from TABLE 8 covalently bound to the N-terminus of the IgG1 sequence from TABLE 7 or anywhere in the disclosure, and (ii) a C-terminal subsequence comprising 1, 2, 3, 4, or 5 IgG1 CH2 N-terminal domain amino acids from TABLE 8 covalently bound to the C-terminus of the IgG1 sequence from TABLE 7 or anywhere in the disclosure.

[0342] IgG1 CH1 and CH2 sequences that can be appended to the N- and/or C-termini of the IgG1 hinge derived CAR spacer sequences of TABLE 7 or anywhere in the disclosure are presented in TABLE 8.

TABLE 8
IgG1. CH1 and CH2 optional N-terminal
CH1 sequences and C-terminal CH2
sequences (sequences from Uniprot P01857
comprising 1 to 5 amino acids flanking
the full IgG1 hinge of SEQ ID NO: 2723)

| CH1 | | CH2 | |
|---|---|---|---|
| Length | Sequences | Length | Sequences |
| 1 | V | 1 | A |
| 2 | KV | 2 | AP |
| 3 | KKV | 3 | APE |
| 4 | DKKV | 4 | APEL |
| | (SEQ ID | | (SEQ ID |
| | NO: 4539) | | NO: 4534) |
| 5 | VDKKV | 5 | APELL |
| | (SEQ ID | | (SEQ ID |
| | NO: 4540) | | NO: 4535) |

[0343] As used herein, the term “IgG2 hinge” refers to the core plus upper hinge of a IgG2 hinge, i.e., the sequence set forth in SEQ ID NO:2768. In some aspects, the IgG2 hinge comprises also the lower hinge, i.e., the sequence set forth in SEQ ID NO:4453 or a subsequence thereof. In some aspects, the subsequence of the IgG2 lower hinge appended to the C-terminus of the IgG2 hinge of SEQ ID NO:2768 or an N-terminal truncation thereof (i.e., a fragment of SEQ ID NO:2768 in which one or more amino acid residues have been removed from its N-terminal region) is selected from the group consisting of A, AP, APE, APEL (SEQ ID NO: 4534), APELL (SEQ ID NO:4535), APELLG (SEQ ID NO:4536), APELLGG (SEQ ID NO:4537), and APELLGGP (SEQ ID NO:4533).

[0344] In some aspects, an IgG2 hinge derived CAR spacer comprises at least five, six, or seven consecutive amino acids of the sequence set forth in SEQ ID NO: 2768. In some aspects, the IgG2 hinge derived CAR spacer comprises an amino acid sequence having at least about 70%, at least about 75%, at least about 80%, at least about 85%, at least about 90%, at least about 95%, at least about 96%, at least about 97%, at least about 98%, at least about 99%, or about 100% sequence identity to the sequence set forth in SEQ ID NO: 2768.

[0345] In some aspects, a CAR comprising an IgG2 hinge derived spacer is capable of inducing an increased Interferon-7 level, e.g., at least 10%, at least about 20%, at least about 30%, at least about 40%, at least about 50%, at least about 60%, at least about 70%, at least about 80%, at least about 90%, at least about 100%, at least about 120%, at least about 150%, compared to a CAR comprising a reference spacer, e.g., a reference IgG4 spacer (e.g., a spacer of SEQ ID NO: 4911).

[0346] In some aspects, a CAR comprising an IgG2 hinge derived spacer is capable of inducing an increased Interleukin-2 level, e.g., at least 10%, at least about 20%, at least about 30%, at least about 40%, at least about 50%, at least about 60%, at least about 70%, at least about 80%, at least about 90%, at least about 100%, at least about 120%, at least about 150%, compared to a CAR comprising a reference spacer, e.g., a reference IgG4 spacer (e.g., a spacer of SEQ ID NO: 4911).

[0347] In some aspects, a CAR comprising an IgG2 derived spacer is capable of inducing an increased TNF-α level, e.g., at least 10%, at least about 20%, at least about 30%, at least about 40%, at least about 50%, at least about 60%, at least about 70%, at least about 80%, at least about 90%, at least about 100%, at least about 120%, at least about 150%, compared to a CAR comprising a reference spacer, e.g., a reference IgG4 spacer (e.g., a spacer of SEQ ID NO: 4911).

[0348] In some aspects, an IgG2 hinge derived CAR spacer comprises at least five, six, or seven consecutive amino acids of the sequence set forth in SEQ ID NO: 2768, but is not SEQ ID NO:4985.

[0349] In some aspects, the term “IgG2 hinge derived CAR spacer” refers, e.g., to a spacer comprising a human IgG2 hinge of SEQ ID NO: 2768 (upper plus core hinge), a human IgG2 hinge of SEQ ID NO: 4541 (upper hinge, core hinge, and lower hinge), fragments thereof, and variants thereof comprising 1, 2, 3, 4, 5 or more additional CH1 region and/or CH2 region amino acids. In some aspects, the term IgG2 derived CAR spacer refers to a subsequence of a human IgG2 hinge of SEQ ID NO: 4541 (upper hinge, core hinge, and lower hinge), wherein the subsequence comprises 7, 8, 9, 10, 11, 12, 13, 14, 15, 16, 17, 18, 19, 20, 21, or 22 consecutive amino acids from the polypeptide sequence set forth in SEQ ID NO: 4541.

[0350] In some aspects, an “IgG2 hinge derived CAR spacer” of the present disclosure comprises, consists, or consist essentially of a sequence disclosed in TABLE 9A.

TABLE 9A
Human IgG2 derived spacers

| Length | SEQ ID | Length | SEQ ID | Length | SEQ ID |
|---|---|---|---|---|---|
| 11 | 2768 | 10 | 2769-2770 | 9 | 2771-2773 |
| 8 | 2774-2777 | 7 | 2778-2782 | | |

[0351] In some aspects, the IgG2 hinge derived CAR spacer comprises an amino acid sequence having at least about 70%, at least about 75%, at least about 80%, at least about 85%, at least about 90%, at least about 95%, at least about 96%, at least about 97%, at least about 98%, at least about 99%, or about 100% sequence identity to the sequence set forth in SEQ ID NO: 4842.

[0352] In some aspects, the IgG2 hinge derived CAR spacer comprises an amino acid sequence having at least about 70%, at least about 75%, at least about 80%, at least about 85%, at least about 90%, at least about 95%, at least about 96%, at least about 97%, at least about 98%, at least about 99%, or about 100% sequence identity to the sequence set forth in SEQ ID NO: 2768.

[0353] In some aspects, a CAR comprising a human IgG2 hinge derived spacer disclosed herein is capable of inducing an increased Interferon-y level, e.g., at least 10%, at least about 20%, at least about 30%, at least about 40%, at least about 50%, at least about 60%, at least about 70%, at least about 80%, at least about 90%, at least about 100%, at least about 120%, at least about 150%, compared to a CAR comprising a reference spacer, e.g., a reference IgG4 spacer (e.g., a spacer of SEQ ID NO: 4911).

[0354] In some aspects, a CAR comprising the IgG2 hinge derived spacer is capable of inducing an increased Interleukin-2 level, e.g., at least 10%, at least about 20%, at least about 30%, at least about 40%, at least about 50%, at least about 60%, at least about 70%, at least about 80%, at least about 90%, at least about 100%, at least about 120%, at least about 150%, compared to a CAR comprising a reference spacer, e.g., a reference IgG4 spacer (e.g., a spacer of SEQ ID NO: 4911). In some aspects, the IgG2 hinge derived CAR spacer is not the sequence set forth in SEQ ID NO: 4986.

[0355] In some aspects, a CAR comprising the IgG2 derived spacer is capable of inducing an increased TNF-α level, e.g., at least 10%, at least about 20%, at least about 30%, at least about 40%, at least about 50%, at least about 60%, at least about 70%, at least about 80%, at least about 90%, at least about 100%, at least about 120%, at least about 150%, compared to a CAR comprising a reference spacer, e.g., a reference IgG4 spacer (e.g., a spacer of SEQ ID NO: 4911).

[0356] In some aspects, the human IgG2 hinge derived CAR spacer of the present disclosure comprises a sequence disclosed in TABLE 9A or anywhere in the disclosure, further comprising an N-terminal subsequence comprising 1, 2, 3, 4, or 5 IgG2 CH1 C-terminal domain amino acids from TABLE 10A covalently bound to the N-terminus of the IgG2 sequence from TABLE 9A or anywhere in the disclosure.

[0357] In some aspects, the human IgG2 hinge derived CAR spacer of the present disclosure comprises a sequence disclosed in TABLE 9A or anywhere in the disclosure, further comprising a C-terminal subsequence comprising 1, 2, 3, 4, or 5 IgG2 CH2 N-terminal domain amino acids from TABLE 10A covalently bound to the C-terminus of the IgG2 sequence from TABLE 9A or anywhere in the disclosure.

[0358] In some aspects, the human IgG2 hinge derived CAR spacer of the present disclosure comprises a sequence disclosed in TABLE 9A or anywhere in the disclosure, further comprising (i) an N-terminal subsequence comprising 1, 2, 3, 4, or 5 IgG2 CH1 C-terminal domain amino acids from TABLE 10A covalently bound to the N-terminus of the IgG2 sequence from TABLE 9A or anywhere in the disclosure, and (ii) a C-terminal subsequence comprising 1, 2, 3, 4, or 5 IgG2 CH2 N-terminal domain amino acids from TABLE 10A covalently bound to the C-terminus of the IgG2 sequence from TABLE 9A or anywhere in the disclosure.

[0359] IgG2 CH1 and CH2 sequences that can be appended to the N- and/or C-termini of the IgG2 hinge derived CAR spacer sequences of TABLE 9A are presented in TABLE 10A.

TABLE 10A
Human IgG2. CH1 and CH2 optional
N-terminal CH1 sequences and C-terminal CH2
sequences (sequences from Uniprot P01859
comprising 1 to 5 amino acids flanking
the full IgG2 hinge of SEQ ID NO: 2768)

| CH1 | | CH2 | |
|---|---|---|---|
| Length | Sequence | Length | Sequence |
| 1 | V | 1 | P |
| 2 | TV | 2 | PA |
| 3 | KTV | 3 | PAP |
| 4 | DKTV | 4 | PAPP |
| | (SEQ ID | | (SEQ ID |
| | NO: 4542) | | NO: 4544) |
| 5 | KDKTV | 5 | PAPPV |
| | (SEQ ID | | (SEQ ID |
| | NO: 4543) | | NO: 4545) |

[0360] In some aspects, the term “IgG2 hinge derived CAR spacer” refers, e.g., to a spacer comprising a murine IgG2 hinge of SEQ ID NO: 4926 (upper plus core hinge), a murine IgG2 hinge of SEQ TD NO: 4992 (upper hinge, core hinge, and lower hinge), fragments thereof, and variants thereof comprising 1, 2, 3, 4, 5 or more additional CH1 region and/or CH2 region amino acids. In some aspects, the term IgG2 derived CAR spacer refers to a subsequence of a murine IgG2 hinge of SEQ TD NO: 4992 (upper hinge, core hinge, and lower hinge), wherein the subsequence comprises 7, 8, 9, 10, 11, 12, 13, 14, 15, 16, 17, 18, 19, 20, 21, or 22 consecutive amino acids from the polypeptide sequence set forth in SEQ TD NO: 4992.

[0361] In some aspects, an “IgG2 hinge derived CAR spacer” of the present disclosure is a “murine IgG2 hinge derived CAR spacer” comprising, consisting, or consisting essentially of a sequence disclosed in TABLE 9B.

TABLE 9B
Murine IgG2A hinge derived CAR spacers

| Length | SEQ ID | Length | SEQ ID | Length | SEQ ID |
|---|---|---|---|---|---|
| 16 | 4926 | 15 | 4927-4928 | 14 | 4929-4931 |
| 13 | 4932-4935 | 12 | 4936-4940 | 11 | 4941-4946 |
| 10 | 4947-4953 | 9 | 4954-4961 | 8 | 4962-4970 |
| 7 | 4971-4980 | | | | |

[0362] In some aspects, the murine IgG2 hinge derived CAR spacer comprises at least five, six, or seven consecutive amino acids of the sequence set forth in SEQ ID NO: 4830. In some aspects, the murine IgG2 hinge derived CAR spacer comprises at least five, six, or seven consecutive amino acids of the sequence set forth in SEQ ID NO: 4831. In some aspects, the murine IgG2 hinge derived CAR spacer comprises at least five, six, or seven consecutive amino acids of the sequence set forth in SEQ ID NO: 4832.

[0363] In some aspects, the murine IgG2 hinge derived CAR spacer comprises an amino acid sequence having at least about 70%, at least about 75%, at least about 80%, at least about 85%, at least about 90%, at least about 95%, at least about 96%, at least about 97%, at least about 98%, at least about 99%, or about 100% sequence identity to the sequence set forth in SEQ ID NO: 4830. In some aspects, the murine IgG2 hinge derived CAR spacer comprises an amino acid sequence having at least about 70%, at least about 75%, at least about 80%, at least about 85%, at least about 90%, at least about 95%, at least about 96%, at least about 97%, at least about 98%, at least about 99%, or about 100% sequence identity to the sequence set forth in SEQ ID NO: 4831. In some aspects, the murine IgG2 hinge derived CAR spacer comprises an amino acid sequence having at least about 70%, at least about 75%, at least about 80%, at least about 85%, at least about 90%, at least about 95%, at least about 96%, at least about 97%, at least about 98%, at least about 99%, or about 100% sequence identity to the sequence set forth in SEQ ID NO: 4832.

[0364] In some aspects, a CAR comprising a murine IgG2 hinge derived CAR spacer disclosed herein is capable of inducing an increased Interferon-y level, e.g., at least 10%, at least about 20%, at least about 30%, at least about 40%, at least about 50%, at least about 60%, at least about 70%, at least about 80%, at least about 90%, at least about 100%, at least about 120%, at least about 150%, compared to a CAR comprising a reference spacer, e.g., a reference IgG4 spacer (e.g., a spacer of SEQ ID NO: 4911).

[0365] In some aspects, a CAR comprising a murine IgG2 hinge derived CAR spacer disclosed herein is capable of inducing an increased Interleukin-2 level, e.g., at least 10%, at least about 20%, at least about 30%, at least about 40%, at least about 50%, at least about 60%, at least about 70%, at least about 80%, at least about 90%, at least about 100%, at least about 120%, at least about 150%, compared to a CAR comprising a reference spacer, e.g., a reference IgG4 spacer (e.g., a spacer of SEQ ID NO: 4911). In some aspects, the murine IgG2 hinge derived CAR spacer is not the sequence set forth in SEQ ID NO: 4986.

[0366] In some aspects, a CAR comprising the murine IgG2 derived CAR spacer is capable of inducing an increased TNF-α level, e.g., at least 10%, at least about 20%, at least about 30%, at least about 40%, at least about 50%, at least about 60%, at least about 70%, at least about 80%, at least about 90%, at least about 100%, at least about 120%, at least about 150%, compared to a CAR comprising a reference spacer, e.g., a reference IgG4 spacer (e.g., a spacer of SEQ ID NO: 4911).

[0367] In some aspects, the murine IgG2 hinge derived CAR spacer of the present disclosure comprises a sequence disclosed in TABLE 9B or anywhere in the disclosure, further comprising an N-terminal subsequence comprising 1, 2, 3, 4, or 5 IgG2 CH1 C-terminal domain amino acids from TABLE 10B covalently bound to the N-terminus of the IgG2 sequence from TABLE 9B or anywhere in the disclosure.

[0368] In some aspects, the murine IgG2 hinge derived CAR spacer of the present disclosure comprises a sequence disclosed in TABLE 9B or anywhere in the disclosure, further comprising a C-terminal subsequence comprising 1, 2, 3, 4, or 5 IgG2 CH2 N-terminal domain amino acids from TABLE 10B covalently bound to the C-terminus of the IgG2 sequence from TABLE 9B or anywhere in the disclosure.

[0369] In some aspects, the murine IgG2 hinge derived CAR spacer of the present disclosure comprises a sequence disclosed in TABLE 9B or anywhere in the disclosure, further comprising (i) an N-terminal subsequence comprising 1, 2, 3, 4, or 5 IgG2 CH1 C-terminal domain amino acids from TABLE 10B covalently bound to the N-terminus of the IgG2 sequence from TABLE 9B or anywhere in the disclosure, and (ii) a C-terminal subsequence comprising 1, 2, 3, 4, or 5 IgG2 CH2 N-terminal domain amino acids from TABLE 10B covalently bound to the C-terminus of the IgG2 sequence from TABLE 9B or anywhere in the disclosure.

[0370] IgG2 CH1 and CH2 sequences that can be appended to the N- and/or C-termini of the IgG2 hinge derived CAR spacer sequences of TABLE 9B are presented in TABLE 10B.

TABLE 10B
Murine IgG2A.
CH1 and CH2 optional N-terminal CH1
sequences and C-terminal CH2 sequences
(sequences from Uniprot P01865 comprising
1 to 5 amino acids flanking the full
murine IgG2A hinge of SEQ ID NO: 4926)

| CH1 | | CH2 | |
|---|---|---|---|
| Length | Sequence | Length | Sequence |
| 1 | I | 1 | A |
| 2 | KI | 2 | AP |
| 3 | KKI | 3 | APN |
| 4 | DKKI | 4 | APNL |
| | (SEQ ID | | (SEQ ID |
| | NO: 4981) | | NO: 4983) |
| 5 | VDKKI | 5 | APNLL |
| | (SEQ ID | | (SEQ ID |
| | NO: 4982) | | NO: 4984) |

[0371] As used herein, the term “IgG3 hinge” refers to the core plus upper hinge of a IgG3 hinge, i.e., the sequence set forth in SEQ ID NO:2813. In some aspects, the IgG3 hinge comprises also the lower hinge (APELLGGP; SEQ ID NO:4533).

[0372] The long hinge of IgG3 is a result of duplications of a hinge exon, encoded by one exon in IgG1, IgG2, and IgG4, but up to four exons in IgG3. One of those exons is common to all IgG3 allotypes, but it also has 1-3 copies of a homologous second type of IgG3-hinge exon. Depending on the number of sequence repeats, the hinge region can vary from 27 to 83 amino acid residues between different IgG3 allotypes (see FIG. 6). As shown in FIG. 6, the different IgG3 allotypes identified include a hinge with a pattern corresponding to a, ab, abb, or abbb, wherein “a” is the sequence set forth in SEQ ID NO: 3848 and “b” is the sequence set forth in SEQ ID NO: 3958. In some aspects, the “b” sequence is a sequence set forth in SEQ ID NO: 4546 (human variant), SEQ ID NO:4547 (Pan troglodytes), SEQ ID NO: 4548 (Pan troglodytes), SEQ ID NO:4549 (Pongo pygmaeus), SEQ ID NO:4550 (Gorilla gorilla), or SEQ ID NO: 4551 (Pongo abelii).

[0373] In some aspects, an IgG3 hinge derived CAR spacer comprises at least five, six, or seven consecutive amino acids of the sequence set forth in SEQ ID NO: 2813.

[0374] In some aspects, a CAR comprising a IgG3 hinge derived spacer is capable of inducing an increased Interferon-7 level, e.g., at least 10%, at least about 20%, at least about 30%, at least about 40%, at least about 50%, at least about 60%, at least about 70%, at least about 80%, at least about 90%, at least about 100%, at least about 120%, at least about 150%, compared to a CAR comprising a reference spacer, e.g., a reference IgG4 spacer (e.g., a spacer of SEQ ID NO: 4911).

[0375] In some aspects, a CAR comprising a IgG3 hinge derived spacer is capable of inducing an increased Interleukin-2 level, e.g., at least 10%, at least about 20%, at least about 30%, at least about 40%, at least about 50%, at least about 60%, at least about 70%, at least about 80%, at least about 90%, at least about 100%, at least about 120%, at least about 150%, compared to a CAR comprising a reference spacer, e.g., a reference IgG4 spacer (e.g., a spacer of SEQ ID NO: 4911).

[0376] In some aspects, a CAR comprising the IgG3 derived spacer is capable of inducing an increased TNF-α level, e.g., at least 10%, at least about 20%, at least about 30%, at least about 40%, at least about 50%, at least about 60%, at least about 70%, at least about 80%, at least about 90%, at least about 100%, at least about 120%, at least about 150%, compared to a CAR comprising a reference spacer, e.g., a reference IgG4 spacer (e.g., a spacer of SEQ ID NO: 4911).

[0377] In some aspects, an IgG3 hinge derived CAR spacer is not SEQ ID NO:2813.

[0378] In some aspects, the IgG3 hinge derived CAR spacer comprises an amino acid sequence having at least about 70%, at least about 75%, at least about 80%, at least about 85%, at least about 90%, at least about 95%, at least about 96%, at least about 97%, at least about 98%, at least about 99%, or about 100% sequence identity to the sequence set forth in SEQ ID NO: 2813.

[0379] As used herein, the term “IgG3 hinge derived CAR spacer” comprises, e.g., a spacer comprising an IgG3 hinge of SEQ ID NO: 2813 (upper plus core hinge), an IgG3 hinge of SEQ ID NO: 4552 (upper hinge, core hinge, and lower hinge), fragments thereof, and variants thereof comprising 1, 2, 3, 4, 5 or more additional CH1 region and/or CH2 region amino acids.

[0380] In some aspects, an IgG3 hinge derived CAR spacer disclosed comprises one of more mutations replacing the Threonine (T) in the subsequence set forth in SEQ ID NO:4553. These threonines are susceptible to glycosylation and also are substrates for trypsin and proteinase K. Accordingly, their replacement can reduce the immunogenicity caused by the CAR spacer and increase resistance to proteases, thus improving the stability of the CAR in vivo.

[0381] In some aspects, an IgG3 hinge derived CAR spacer of the present disclosure comprises, consists, or consist essentially of a sequence disclosed in TABLE 11.

TABLE 11
IgG3 derived spacers

| Length | SEQ ID | Length | SEQ ID | Length | SEQ ID |
|---|---|---|---|---|---|
| 62 | 2813 | 61 | 2814-2815 | 60 | 2816-2818 |
| 59 | 2819-2822 | 58 | 2823-2827 | 57 | 2828-2833 |
| 56 | 2834-2840 | 55 | 2841-2848 | 54 | 2849-2857 |
| 53 | 2858-2867 | 52 | 2868-2878 | 51 | 2879-2890 |
| 50 | 2891-2903 | 49 | 2904-2917 | 48 | 2918-2932 |
| 47 | 2933-2948 | 46 | 2949-2965 | 45 | 2966-2983 |
| 44 | 2984-3002 | 43 | 3003-3022 | 42 | 3023-3043 |
| 41 | 3044-3065 | 40 | 3066-3088 | 39 | 3089-3112 |
| 38 | 3113-3137 | 37 | 3138-3163 | 36 | 3164-3190 |
| 35 | 3191-3218 | 34 | 3219-3247 | 33 | 3248-3277 |
| 32 | 3278-3308 | 31 | 3309-3340 | 30 | 3341-3373 |
| 29 | 3374-3407 | 28 | 3408-3442 | 27 | 3443-3478 |
| 26 | 3479-3515 | 25 | 3516-3553 | 24 | 3554-3592 |
| 23 | 3593-3632 | 22 | 3633-3673 | 21 | 3674-3715 |
| 20 | 3716-3758 | 19 | 3759-3802 | 18 | 3803-3847 |
| 17 | 3848-3893 | 16 | 3894-3940 | 15 | 3941-3988 |
| 14 | 3989-4037 | 13 | 4038-4087 | 12 | 4088-4138 |
| 11 | 4139-4190 | 10 | 4191-4243 | 9 | 4244-4297 |
| 8 | 4298-4352 | 7 | 4755-4810 | | |

[0382] In some aspects, the IgG3 hinge derived CAR spacer comprises an amino acid sequence having at least about 70%, at least about 75%, at least about 80%, at least about 85%, at least about 90%, at least about 9500 at least about 96%, at least about 9700 at least about 98%, at least about 9900, or about 10000 sequence identity to a sequence selected from the group consisting of SEQ ID NO: 4833; SEQ ID NO: 4834; SEQ ID NO: 4835; SEQ ID NO: 4836; SEQ ID NO: 4837; SEQ ID NO: 4838, SEQ ID NO: 4841; and any combination thereof.

[0383] In some aspects, the IgG3 hinge derived CAR spacer comprises an amino acid sequence having at least about 70%, at least about 75%, at least about 80%, at least about 85%, at least about 90%, at least about 9500 at least about 96%, at least about 9700 at least about 98%, at least about 99, or about 100% sequence identity to the sequence set forth in SEQ TD NO: 4833.

[0384] In some aspects, the IgG3 hinge derived CAR spacer comprises an amino acid sequence having at least about 70%, at least about 75%, at least about 80%, at least about 85%, at least about 9000, at least about 9500, at least about 9600, at least about 9700, at least about 9800, at least about 99, or about 1000% sequence identity to the sequence set forth in SEQ TD NO: 4834.

[0385] In some aspects, the IgG3 hinge derived CAR spacer comprises an amino acid sequence having at least about 70%, at least about 75%, at least about 80%, at least about 85%, at least about 90%, at least about 95%, at least about 96%, at least about 97%, at least about 98%, at least about 99%, or about 100% sequence identity to the sequence set forth in SEQ ID NO: 4835.

[0386] In some aspects, the IgG3 hinge derived CAR spacer comprises an amino acid sequence having at least about 70%, at least about 75%, at least about 80%, at least about 85%, at least about 90%, at least about 95%, at least about 96%, at least about 97%, at least about 98%, at least about 99%, or about 100% sequence identity to the sequence set forth in SEQ ID NO: 4836.

[0387] In some aspects, the IgG3 hinge derived CAR spacer comprises an amino acid sequence having at least about 70%, at least about 75%, at least about 80%, at least about 85%, at least about 90%, at least about 95%, at least about 96%, at least about 97%, at least about 98%, at least about 99%, or about 100% sequence identity to the sequence set forth in SEQ ID NO: 4837.

[0388] In some aspects, the IgG3 hinge derived CAR spacer comprises an amino acid sequence having at least about 70%, at least about 75%, at least about 80%, at least about 85%, at least about 90%, at least about 95%, at least about 96%, at least about 97%, at least about 98%, at least about 99%, or about 100% sequence identity to the sequence set forth in SEQ ID NO: 4838.

[0389] In some aspects, the IgG3 hinge derived CAR spacer comprises an amino acid sequence having at least about 70%, at least about 75%, at least about 80%, at least about 85%, at least about 90%, at least about 95%, at least about 96%, at least about 97%, at least about 98%, at least about 99%, or about 100% sequence identity to the sequence set forth in SEQ ID NO: 4841.

[0390] In some aspects, the IgG3 hinge derived CAR spacer of the present disclosure comprises a sequence disclosed in TABLE 11 or anywhere in the disclosure, further comprising an N-terminal subsequence comprising 1, 2, 3, 4, or 5 IgG3 CH1 C-terminal domain amino acids from TABLE 12 covalently bound to the N-terminus of the IgG3 sequence from TABLE 11 or anywhere in the disclosure.

[0391] In some aspects, the IgG3 hinge derived CAR spacer of the present disclosure comprises a sequence disclosed in TABLE 11 or anywhere in the disclosure, further comprising a C-terminal subsequence comprising 1, 2, 3, 4, or 5 IgG3 CH2 N-terminal domain amino acids from TABLE 12 covalently bound to the C-terminus of the IgG3 sequence from TABLE 11 or anywhere in the disclosure.

[0392] In some aspects, the IgG3 hinge derived CAR spacer of the present disclosure comprises a sequence disclosed in TABLE 11 or anywhere in the disclosure, further comprising (i) an N-terminal subsequence comprising 1, 2, 3, 4, or 5 IgG3 CH1 C-terminal domain amino acids from TABLE 12 covalently bound to the N-terminus of the IgG3 sequence from TABLE 11 or anywhere in the disclosure, and (ii) a C-terminal subsequence comprising 1, 2, 3, 4, or 5 IgG3 CH2 N-terminal domain amino acids from TABLE 12 covalently bound to the C-terminus of the IgG3 sequence from TABLE 11 or anywhere in the disclosure.

[0393] IgG3 CH1 and CH2 sequences that can be appended to the N- and/or C-termini of the IgG3 hinge derived CAR spacer sequences of TABLE 11 or anywhere in the disclosure are presented in TABLE 12.

TABLE 12
IgG3. CH1 and CH2 optional N-terminal
CH1 sequences and C-terminal CH2 sequences
(sequences from Uniprot P01860 comprising
1 to 5 amino acids flanking the full
IgG3 hinge of SEQ ID NO: 2813)

| CH1 | | CH2 | |
|---|---|---|---|
| Length | Sequences | Length | Sequences |
| 1 | V | 1 | A |
| 2 | RV | 2 | AP |
| 3 | KRV | 3 | APE |
| 4 | DKRV | 4 | APEL |
| | (SEQ ID | | (SEQ ID |
| | NO: 4554) | | NO: 4534) |
| 5 | VDKRV | 5 | APELL |
| | (SEQ ID | | (SEQ ID |
| | NO: 4555) | | NO: 4535) |

[0394] As used herein, the term “IgG4 hinge” refers to the core plus upper hinge of a IgG4 hinge, i.e., the sequence set forth in SEQ ID NO:4353. In some aspects, the IgG4 hinge comprises also the lower hinge (APEFLGGP; SEQ ID NO:4556) or a subsequence thereof. In some aspects, the subsequence of the IgG4 lower hinge appended to the C-terminus of the IgG4 hinge of SEQ ID NO:4353 or an N-terminal truncation thereof (i.e., a fragment of SEQ ID NO:4353 in which one or more amino acid residues have been removed from its N-terminal region) is selected from the group consisting of A, AP, APE, APEF (SEQ ID NO: 4557), APEFL (SEQ ID NO:4558), APEFLG (SEQ ID NO:4559), APEFLGG (SEQ ID NO:4560), and APEFLGGP (SEQ ID NO:4556).

[0395] As used herein, the term “IgG4 hinge derived CAR spacer” comprises, e.g., a spacer comprising an IgG4 hinge of SEQ ID NO: 4353 (upper plus core hinge), an IgG4 hinge of SEQ ID NO: 4561 (upper hinge, core hinge, and lower hinge), fragments thereof, and variants thereof comprising 1, 2, 3, 4, 5 or more additional CH1 region and/or CH2 region amino acids. In some aspects, the term IgG4 derived CAR spacer refers to a subsequence of an IgG4 hinge of SEQ ID NO: 4561 (upper hinge, core hinge, and lower hinge), wherein the subsequence comprises 7, 8, 9, 10, 11, 12, 13, 14, 15, 16, 17, 18, 19, 20, 21, or 22 consecutive amino acids from the polypeptide sequence set forth in SEQ ID NO: 4561.

[0396] In some aspects, an IgG4 hinge derived CAR spacer comprises at least five, six, or seven consecutive amino acids of the sequence set forth in SEQ ID NO: 4353. In some aspects, the IgG4 hinge derived CAR spacer comprises an amino acid sequence having at least about 70%, at least about 75%, at least about 80%, at least about 85%, at least about 90%, at least about 95%, at least about 96%, at least about 97%, at least about 98%, at least about 99%, or about 100% sequence identity to the sequence set forth in SEQ ID NO: 4353.

[0397] In some aspects, a CAR comprising the IgG4 hinge derived spacer is capable of inducing an increased Interferon-7 level, e.g., at least 10%, at least about 20%, at least about 30%, at least about 40%, at least about 50%, at least about 60%, at least about 70%, at least about 80%, at least about 90%, at least about 100%, at least about 120%, at least about 150%, compared to a CAR comprising a reference spacer, e.g., a reference IgG4 spacer (e.g., a spacer of SEQ ID NO: 4911).

[0398] In some aspects, a CAR comprising the IgG4 hinge derived spacer is capable of inducing an increased Interleukin-2 level, e.g., at least 10%, at least about 20%, at least about 30%, at least about 40%, at least about 50%, at least about 60%, at least about 70%, at least about 80%, at least about 90%, at least about 100%, at least about 120%, at least about 150%, compared to a CAR comprising a reference spacer, e.g., a reference IgG4 spacer (e.g., a spacer of SEQ ID NO: 4911).

[0399] In some aspects, the IgG4 hinge derived CAR spacer is not SEQ ID NO: 4987. In some aspects, the IgG4 hinge derived CAR spacer is not SEQ ID NO: 4988. In some aspects, the IgG4 hinge derived CAR spacer is not SEQ ID NO: 4989. In some aspects, the IgG4 hinge derived CAR spacer is not SEQ ID NO: 4990. In some aspects, the IgG4 hinge derived CAR spacer is not SEQ ID NO: 4991.

[0400] In some aspects, an “IgG4 hinge derived CAR spacer” of the present disclosure comprises, consists, or consist essentially of a sequence disclosed in TABLE 13.

TABLE 13
Ig G4 derived spacers

| Length | SEQ ID | Length | SEQ ID | Length | SEQ ID |
|---|---|---|---|---|---|
| 9 | 4353 | 11 | 4354-4355 | 10 | 4356-4358 |
| 8 | 4359-4362 | 8 | 4363-4367 | 7 | 4368-4373 |

[0401] In some aspects, the IgG4 hinge derived CAR spacer of the present disclosure comprises a sequence disclosed in TABLE 13 or anywhere in the disclosure, further comprising an N-terminal subsequence comprising 1, 2, 3, 4, or 5 IgG4 CH1 C-terminal domain amino acids from TABLE 14 covalently bound to the N-terminus of the IgG4 sequence from TABLE 13 or anywhere in the disclosure. In some aspects, the IgG4 hinge derived CAR spacer of the present disclosure comprises a sequence disclosed in TABLE 13 or anywhere in the disclosure, further comprising a C-terminal subsequence comprising 1, 2, 3, 4, or 5 IgG4 CH2 N-terminal domain amino acids from TABLE 14 covalently bound to the C-terminus of the IgG4 sequence from TABLE 13 or anywhere in the disclosure.

[0402] In some aspects, the IgG4 hinge derived CAR spacer of the present disclosure comprises a sequence disclosed in TABLE 13 or anywhere in the disclosure, further comprising (i) an N-terminal subsequence comprising 1, 2, 3, 4, or 5 IgG4 CH1 C-terminal domain amino acids from TABLE 14 covalently bound to the N-terminus of the IgG4 sequence from TABLE 13 or anywhere in the disclosure, and (ii) a C-terminal subsequence comprising 1, 2, 3, 4, or 5 IgG4 CH2 N-terminal domain amino acids from TABLE 14 covalently bound to the C-terminus of the IgG4 sequence from TABLE 13 or anywhere in the disclosure.

[0403] IgG4 CH1 and CH2 sequences that can be appended to the N- and/or C-termini of the IgG4 hinge derived CAR spacer sequences of TABLE 13 or anywhere in the disclosure are presented in TABLE 14.

TABLE 14
IgG4. CH1 and CH2 optional N-terminal
CH1 sequences and C-terminal CH2 sequences
(sequences from Uniprot P01861 comprising
1 to 5 amino acids flanking the full
IgG4 hinge of SEQ ID NO: 4353).

| CH1 | | CH2 | |
|---|---|---|---|
| Length | Sequence | Length | Sequence |
| 1 | V | 1 | A |
| 2 | RV | 2 | AP |
| 3 | KRV | 3 | APE |
| 4 | DKRV | 4 | APEF |
| | (SEQ ID | | (SEQ ID |
| | NO: 4554) | | NO: 4557) |
| 5 | VDKRV | 5 | APEFL |
| | (SEQ ID | | (SEQ ID |
| | NO: 4555) | | NO: 4558) |

### II.D. IgE Hinge Derived CAR Spacer

[0404] Immunoglobulin E (IgE) is a type of immunoglobulin (Ig) isotype comprising two heavy chains (F chain) and two light chains, with the F chain containing 4 Ig-like constant domains (Cε1-Cε4). IgE is unique in that it lacks an actual hinge region and gets replaced by the Cε2 domain.

[0405] As used herein, the term “IgE hinge” refers to the sequence located between the C-terminus of Cε1 and the N-terminus of C2, i.e., the sequence located between amino acids 241 and 260. Accordingly, as defined herein, a full length “IgE hinge” would correspond to the sequence set forth in SEQ ID NO: 4374.

[0406] As used herein, the term “IgE hinge derived CAR spacer” comprises, e.g., a spacer comprising the sequence set forth in SEQ ID NO: 4374, fragments thereof, and variants thereof comprising 1, 2, 3, 4, 5 or more additional Cε1 region and/or Cε2 region amino acids.

[0407] In some aspects, an IgE hinge derived CAR spacer comprises at least five, six, or seven consecutive amino acids of the sequence set forth in SEQ ID NO: 4374. In some aspects, the IgE hinge derived CAR spacer comprises an amino acid sequence having at least about 70%, at least about 75%, at least about 80%, at least about 85%, at least about 90%, at least about 95%, at least about 96%, at least about 97%, at least about 98%, at least about 99%, or about 100% sequence identity to the sequence set forth in SEQ ID NO: 4374.

[0408] In some aspects, a CAR comprising the IgE hinge derived spacer is capable of inducing an increased Interferon-7 level, e.g., at least 10%, at least about 20%, at least about 30%, at least about 40%, at least about 50%, at least about 60%, at least about 70%, at least about 80%, at least about 90%, at least about 100%, at least about 120%, at least about 150%, compared to a CAR comprising a reference spacer, e.g., a reference IgG4 spacer (e.g., a spacer of SEQ ID NO: 4911).

[0409] In some aspects, a CAR comprising the IgE hinge derived spacer is capable of inducing an increased Interleukin-2 level, e.g., at least 10%, at least about 20%, at least about 30%, at least about 40%, at least about 50%, at least about 60%, at least about 70%, at least about 80%, at least about 90%, at least about 100%, at least about 120%, at least about 150%, compared to a CAR comprising a reference spacer, e.g., a reference IgG4 spacer (e.g., a spacer of SEQ ID NO: 4911).

[0410] In some aspects, a CAR comprising a IgE hinge derived spacer disclosed herein is capable of inducing an increased TNF-α level, e.g., at least 10%, at least about 20%, at least about 30%, at least about 40%, at least about 50%, at least about 60%, at least about 70%, at least about 80%, at least about 90%, at least about 100%, at least about 120%, at least about 150%, compared to a CAR comprising a reference spacer, e.g., a reference IgG4 spacer (e.g., a spacer of SEQ ID NO: 4911).

[0411] In some aspects, an IgE hinge derived CAR spacer of the present disclosure comprises, consists, or consist essentially of a sequence disclosed in TABLE 15.

TABLE 15
IgE derived spacers

| Length | SEQ ID | Length | SEQ ID | Length | SEQ ID |
|---|---|---|---|---|---|
| 19 | 4374 | 18 | 4375-4376 | 17 | 4377-4379 |
| 16 | 4380-4383 | 15 | 4384-4388 | 14 | 4389-4394 |
| 13 | 4395-4401 | 12 | 4402-4409 | 11 | 4410-4418 |
| 10 | 4419-4428 | 9 | 4429-4439 | 8 | 4440-4451 |
| 7 | 4452-4464 | | | | |

[0412] In some aspects, the IgE hinge derived CAR spacer comprises an amino acid sequence having at least about 70%, at least about 75%, at least about 80%, at least about 85%, at least about 90%, at least about 95%, at least about 96%, at least about 97%, at least about 98%, at least about 99%, or about 100% sequence identity to the sequence set forth in SEQ ID NO: 4856.

[0413] In some aspects, the IgE hinge derived CAR spacer of the present disclosure comprises a sequence disclosed in TABLE 15 or anywhere in the disclosure, further comprising an N-terminal subsequence comprising 1, 2, 3, 4, or 5 IgE Cε1 C-terminal domain amino acids from TABLE 16 covalently bound to the N-terminus of the IgE sequence from TABLE 15 or anywhere in the disclosure.

[0414] In some aspects, the IgE hinge derived CAR spacer of the present disclosure comprises a sequence disclosed in TABLE 15 or anywhere in the disclosure, further comprising a C-terminal subsequence comprising 1, 2, 3, 4, or 5 IgE Cε2 N-terminal domain amino acids from TABLE 16 covalently bound to the C-terminus of the IgE sequence from TABLE 15 or anywhere in the disclosure.

[0415] In some aspects, the IgE hinge derived CAR spacer of the present disclosure comprises a sequence disclosed in TABLE 15 or anywhere in the disclosure, further comprising (i) an N-terminal subsequence comprising 1, 2, 3, 4, or 5 IgE Cel C-terminal domain amino acids from TABLE 16 covalently bound to the N-terminus of the IgE sequence from TABLE 15 or anywhere in the disclosure, and (ii) a C-terminal subsequence comprising 1, 2, 3, 4, or 5 IgE Cε2 N-terminal domain amino acids from TABLE 16 covalently bound to the C-terminus of the IgE sequence from TABLE 15 or anywhere in the disclosure.

[0416] IgE Cel and Cε2 sequences that can be appended to the N- and/or C-termini of the IgE hinge derived CAR spacer sequences of TABLE 15 or anywhere in the disclosure are presented in TABLE 16.

TABLE 16
IgE. Cε1 and Cε2 optional N-terminal
Cε1 sequences and C-terminal Cε2 sequences
(sequences from Uniprot P01854 comprising 1
to 5 amino acids flanking the full IgGE
hinge of SEQ ID NO: 4374).

| Cε1 | | Cε2 | |
|---|---|---|---|
| Length | Sequences | Length | Sequences |
| 1 | D | 1 | K |
| 2 | TD | 2 | KI |
| 3 | STD | 3 | KIL |
| 4 | SSTD | 4 | KILQ |
| | (SEQ ID | | (SEQ ID |
| | NO: 4562) | | NO: 4564) |
| 5 | PSSTD | 5 | KILQS |
| | (SEQ ID | | (SEQ ID |
| | NO: 4563) | | NO: 4565) |

[0417] For simplicity, the IgE Cel region is considered a CH1 region, and the IgE Cε2 region is considered a CH2 region. Accordingly, references to a CH1 of IgM throughout the specification refer to IgE Cel. Similarly, references to a CH2 of IgE throughout the specification refer to IgE Cε2.

### II.E. IgM Hinge Derived CAR Spacer

[0418] Immunoglobulin M (IgM) is the largest antibody, and it is the first antibody to appear in the response to initial exposure to an antigen. IgM includes light chains and heavy chains. The light chain (k or x) is a protein of ˜220 amino acids, composed of a variable domain, VL (a segment of approximately 110 amino acids), and a constant domain, CL (also approximately 110 amino acids long). The p heavy chain of IgM is a protein of ˜576 amino acids, and includes a variable domain (VH-110 amino acids), four distinct constant region domains (Cμ1, Cμ2, Cμ3, Cμ4, each ˜110 amino acids) and a “tailpiece” of ˜20 amino acids. Cμ1 and Cμ2 are connected by the connector sequence set forth in SEQ ID NO:4727.

[0419] For the purposes of the present the disclosure, the term “IgM hinge” is defined as an extended sequence surrounding the Cμ1-Cμ2 connector. Accordingly, as defined herein, a full length “IgM hinge” of the present disclosure would correspond to the sequence set forth in SEQ ID NO: 4465.

[0420] As used herein, the term “IgM hinge derived CAR spacer” comprises, e.g., a spacer comprising the sequence set forth in SEQ ID NO: 4465, fragments thereof, and variants thereof comprising 1, 2, 3, 4, 5 or more additional Cp region and/or Cp region amino acids. In some aspects, the IgM hinge derived CAR spacer is a Cμ1-Cμ2 connector having the sequence set forth in SEQ ID NO:4727.

[0421] In some aspects, an IgM hinge derived CAR spacer comprises at least five, six, or seven consecutive amino acids of the sequence set forth in SEQ ID NO: 4465. In some aspects, the IgM hinge derived CAR spacer comprises an amino acid sequence having at least about 70%, at least about 75%, at least about 80%, at least about 85%, at least about 90%, at least about 95%, at least about 96%, at least about 97%, at least about 98%, at least about 99%, or about 100% sequence identity to the sequence set forth in SEQ ID NO: 4465.

[0422] In some aspects, a CAR comprising the IgM hinge derived spacer is capable of inducing an increased Interferon-γ level, e.g., at least 10%, at least about 20%, at least about 30%, at least about 40%, at least about 50%, at least about 60%, at least about 70%, at least about 80%, at least about 90%, at least about 100%, at least about 120%, at least about 150%, compared to a CAR comprising a reference spacer, e.g., a reference IgG4 spacer (e.g., a spacer of SEQ ID NO: 4911).

[0423] In some aspects, a CAR comprising the IgM hinge derived spacer is capable of inducing an increased Interleukin-2 level, e.g., at least 10%, at least about 20%, at least about 30%, at least about 40%, at least about 50%, at least about 60%, at least about 70%, at least about 80%, at least about 90%, at least about 100%, at least about 120%, at least about 150%, compared to a CAR comprising a reference spacer, e.g., a reference IgG4 spacer (e.g., a spacer of SEQ ID NO: 4911).

[0424] In some aspects, a CAR comprising the IgM hinge derived spacer is capable of inducing an increased TNF-α level, e.g., at least 10%, at least about 20%, at least about 30%, at least about 40%, at least about 50%, at least about 60%, at least about 70%, at least about 80%, at least about 90%, at least about 100%, at least about 120%, at least about 150%, compared to a CAR comprising a reference spacer, e.g., a reference IgG4 spacer (e.g., a spacer of SEQ ID NO: 4911).

[0425] In some aspects, an IgM hinge derived CAR spacer of the present disclosure comprises, consists, or consist essentially of a sequence disclosed in TABLE 17.

TABLE 17
IgM derived spacers

| Length | SEQ ID | Length | SEQ ID | Length | SEQ ID |
|---|---|---|---|---|---|
| 26 | 4465 | 25 | 2783-2784 | 24 | 2785-2787 |
| 23 | 2788-2791 | 22 | 2792-2796 | 21 | 2797-2802 |
| 20 | 2803-2809 | 19 | 2810-2812, | 18 | 4571-4579 |
| | | | 4566-4570 | | |
| 17 | 4580-4589 | 16 | 4590-4600 | 15 | 4601-4612 |
| 14 | 4613-4625 | 13 | 4626-4639 | 12 | 4640-4654 |
| 11 | 4655-4670 | 10 | 4671-4687 | 9 | 4688-4705 |
| 8 | 4706-4724 | 7 | 4725-4744 | | |

[0426] In some aspects, the IgM hinge derived CAR spacer comprises an amino acid sequence having at least about 70%, at least about 75%, at least about 80%, at least about 85%, at least about 90%, at least about 95%, at least about 96%, at least about 97%, at least about 98%, at least about 99%, or about 100% sequence identity to a sequence selected from the group consisting of SEQ ID NO: 4857; SEQ ID NO: 4858; SEQ ID NO: 4859; and any combination thereof.

[0427] In some aspects, the IgM hinge derived CAR spacer comprises an amino acid sequence having at least about 70%, at least about 75%, at least about 80%, at least about 85%, at least about 90%, at least about 95%, at least about 96%, at least about 97%, at least about 98%, at least about 99%, or about 100% sequence identity to the sequence set forth in SEQ ID NO: 4857.

[0428] In some aspects, the IgM hinge derived CAR spacer comprises an amino acid sequence having at least about 70%, at least about 75%, at least about 80%, at least about 85%, at least about 90%, at least about 95%, at least about 96%, at least about 97%, at least about 98%, at least about 99%, or about 100% sequence identity to the sequence set forth in SEQ ID NO: 4858.

[0429] In some aspects, the IgM hinge derived CAR spacer comprises an amino acid sequence having at least about 70%, at least about 75%, at least about 80%, at least about 85%, at least about 90%, at least about 95%, at least about 96%, at least about 97%, at least about 98%, at least about 99%, or about 100% sequence identity to the sequence set forth in SEQ ID NO: 4859.

[0430] In some aspects, the IgM hinge derived CAR spacer of the present disclosure comprises a sequence disclosed in TABLE 17 or anywhere in the disclosure, further comprising an N-terminal subsequence comprising 1, 2, 3, 4, or 5 IgM Cμ1 C-terminal domain amino acids from TABLE 18 covalently bound to the N-terminus of the IgM sequence from TABLE 17 or anywhere in the disclosure.

[0431] In some aspects, the IgM hinge derived CAR spacer of the present disclosure comprises a sequence disclosed in TABLE 17 or anywhere in the disclosure, further comprising a C-terminal subsequence comprising 1, 2, 3, 4, or 5 IgM Cμ2 N-terminal domain amino acids from TABLE 18 covalently bound to the C-terminus of the IgM sequence from TABLE 17 or anywhere in the disclosure.

[0432] In some aspects, the IgM hinge derived CAR spacer of the present disclosure comprises a sequence disclosed in TABLE 17 or anywhere in the disclosure, further comprising (i) an N-terminal subsequence comprising 1, 2, 3, 4, or 5 IgN Cμ1 C-terminal domain amino acids from TABLE 18 covalently bound to the N-terminus of the IgM sequence from TABLE 17 or anywhere in the disclosure, and (ii) a C-terminal subsequence comprising 1, 2, 3, 4, or 5 IgM Cμ2 N-terminal domain amino acids from TABLE 18 covalently bound to the C-terminus of the IgM sequence from TABLE 17 or anywhere in the disclosure.

[0433] IgM Cμ1 and Cμ2 sequences that can be appended to the N- and/or C-termini of the IgM hinge derived CAR spacer sequences of TABLE 17 or anywhere in the disclosure are presented in TABLE 18.

TABLE 18
IgM. Cμ1 and Cμ2 optional N-terminal
Cμ1 sequences and C-terminal Cμ2 sequences
(sequences from Uniprot P01871 comprising 1
to 5 amino acids flanking the full IgM hinge
of SEQ ID NO: 4465).

| Cμ1 | | Cμ2 | |
|---|---|---|---|
| Length | Sequences | Length | Sequences |
| 1 | V | 1 | R |
| 2 | NV | 2 | RK |
| 3 | KNV | 3 | RKS |
| 4 | EKNV | 4 | RKSK |
| | (SEQ ID | | (SEQ ID |
| | NO: 4745) | | NO: 4747) |
| 5 | KEKNV | 5 | RKSKL |
| | (SEQ ID | | (SEQ ID |
| | NO: 4746) | | NO: 4748) |

[0434] For simplicity, the IgM Cμ1 region is considered a CH1 region, and the IgM Cμ2 region is considered a CH2 region. Accordingly, references to a CH1 of IgM throughout the specification refer to IgM Cμ1. Similarly, references to a CH2 of IgM throughout the specification refer to IgM Cμ2.

[0435] In some aspects, a CAR spacer of the present disclosure comprises a sequence set forth in TABLES 1, 3, 5, 7, 9A, 9B, 11, 13, 15, 17, or a combination thereof. In some aspects, the CAR spacer of the present disclosure comprises a sequence set forth in TABLES 1, 3, 5, 7, 9A, 9B, 11, 13, 15, 17, or a combination thereof and further comprises an N-terminal sequence set forth in TABLES 2, 4, 6, 8, 10A, 10B, 12, 14, 16, 18, or a combination thereof. In some aspects, the CAR spacer of the present disclosure comprises a sequence set forth in TABLES 1, 3, 5, 7, 9A, 9B, 11, 13, 15, 17 or a combination thereof and further comprises a C-terminal sequence set form in TABLES 2, 4, 6, 8, 10A, 10B, 12, 14, 16, 18, or a combination thereof. In some aspects, the CAR spacer of the present disclosure comprises a sequence set forth in TABLES 1, 3, 5, 7, 9A, 9B, 11, 13, 15, 17, or a combination thereof and further comprises (i) an N-terminal sequence set forth in TABLES 2, 4, 6, 8, 10A, 10B, 12, 14, 16, 18, or a combination thereof, and (ii) a C-terminal sequence set form in TABLES 2, 4, 6, 8, 10A, 10B, 12, 14, 16, 18, or a combination thereof.

[0436] In some aspects, a CAR spacer of the present disclosure is 7, 8, 9, 10, 11, 12, 13, 14, 15, 16, 17, 18, 19, 20, 21, 22, 23, 24, 25, 26, 27, 28, 29, 30, 31, 32, 33, 34, 35, 36, 37, 38, 39, 40, 41, 42, 43, 44, 45, 46, 47, 48, 49, 50, 51, 52, 53, 54, 55, 56, 57, 58, 59, 60, 61, 62, 63, 64, 65, 66, 67, 68, 69, 70, 71, 72, 73, 74, 75, 76, 77, 78, 79, 80, 81, 82, 83, 84, 85, 86, 87, 88, 89, 90, 91, 92, 93, 94, 95, 96, 97, 98, 99, 100, 101, 102, 103, 104, 105, 106, 107, 108, 109, 110, 111, 112, 113, 114, 115, 116, 117, 118, 119, 120, 121, 122, 123, 124, 125, 126, 127, 128, 129, 130, 131, 132, 133, 134, 135, 136, 137, 138, 139, 140, 141, 142, 143, 144, 145, 146, 147, 148, 149, 150, 151, 152, 153, 154, 155, 156, 157, 158, 159, 160, 161, 162, 163, 164, 165, 166, 167, 168, 169, 170, 171, 172, 173, 174, 175, 176, 177, 178, 179, 180, 181, 182, 183, 184, 185, 186, 187, 188, 189, 190, 191, 192, 193, 194, 195, 196, 197, 198, 199, 200, 201, 202, 203, 204, 205, 206, 207, 208, 209, 210, 211, 212, 213, 214, 215, 216, 217, 218, 219, 220, 221, 222, 223, 224, 225, 226, 227, 228, 229, 230, 231, 232, 233, 234, 235, 236, 237, 238, 239, 240, 241, 242, 243, 244, 245, 246, 247, 248, 249, 250, 251, 252, 253, 254, 255, 256, 257, 258, 259, 260, 261, 262, 263, 264, 265, 266, 267, 268, 269, 270, 271, 272, 273, 274, 275, 276, 277, 278, 279, 280, 281, 282, 283, 284, 285, 286, 287, 288, 289, 290, 291, 292, 293, 294, 295, 296, 297, 298, 299, 300, 301, 302, 303, 304, 305, 306, 307, 308, 309, 310, 311, 312, 313, 314, 315, 316, 317, 318, 319, 320, 321, 322, 323, 324, 325, 326, 327, 328, 329, 330, 331, 332, 333, 334, 335, 336, 337, 338, 339, 340, 341, 342, 343, 344, 345, 346, 347, 348, 349, 350, 351, 352, 353, 354, 355, 356, 357, 358, 359, 360, 361, 362, 363, 364, 365, 366, 367, 368, 369, 370, 371, 372, 373, 374, 375, 376, 377, 378, 379, 380, 381, 382, 383, 384, 385, 386, 387, 388, 389, 390, 391, 392, 393, 394, 395, 396, 397, 398, 399, or 400 amino acids in length.

[0437] In some aspects, a CAR spacer of the present disclosure is less that about 400, less than about 390, less than about 385, less than about 380, less than about 375, less than about 370, less than about 365, less than about 360, less than about 355, less than about 350, less than about 345, less than about 340, less than about 335, less than about 330, less than about 325, less than about 320, less than about 315, less than about 310, less than about 305, less than about 300, less than about 295, less than about 290, less than about 285, less than about 280, less than about 275, less than about 270, less than about 265, less than about 260, less than about 255, less than about 250, less than about 245, less than about 240, less than about 235, less than about 230, less than about 225, less than about 220, less than about 215, less than about 210, less than about 205, less than about 200, less than about 195, less than about 190, less than about 185, less than about 180, less than about 175, less than about 170, less than about 165, less than about 160, less than about 155, less than about 150, less than about 145, less than about 140, less than about 135, less than about 130, less than about 125, less than about 120, less than about 115, less than about 110, less than about 105, less than about 100, less than about 95, less than about 90, less than about 85, less than about 80, less than about 75, less than about 70, less than about 65, less than about 60, less than about 55, less than about 50, less than about 45, less than about 40, less than about 35, less than about 30, less than about 25, less than about 20, less than about 15, less than about 10, or less than about 5 amino acids in length.

[0438] In some aspects, a CAR spacer of the present disclosure is between 4 and 8, between 4 and 9, between 4 and 10, between 5 and 8, between 5 and 9, between 5 and 10, between 4 and 12, between 4 and 13, between 4 and 14, between 4 and 15, between 4 and 16, between 5 and 14, between 5 and 15, between 5 and 16, between 6 and 12, between 6 and 13, between 6 and 14, between 6 and 15, between 6 and 16, between 7 and 9, between 7 and 10, between 7 and 11, between 7 and 12, between 7 and 13, between 7 and 14, between 7 and 15, between 7 and 16, between 10 and 15, between 15 and 20, between 20 and 25, between 25 and 30, between 30 and 35, between 35 and 40, between 40 and 45, between 45 and 50, between 50 and 55, between 55 and 60, between 60 and 65, between 65 and 70, between 70 and 75, between 75 and 80, between 80 and 85, between 85 and 90, between 90 and 95, between 95 and 100, between 100 and 105, between 105 and 110, between 110 and 115, between 115 and 120, between 120 and 125, between 125 and 130, between 130 and 135, between 135 and 140, between 140 and 145, between 145 and 150, between 150 and 155, between 155 and 160, between 160 and 165, between 165 and 170, between 170 and 175, between 175 and 180, between 180 and 185, between 185 and 190, between 190 and 195, between 195 and 200 amino acids in length.

[0439] In some aspects, a CAR spacer of the present disclosure is between about 400 and about 390, between 390 and about 380, between about 380 and about 370, between about 370 and about 360, between about 360 and about 350, between about 350 and about 340, between about 340 and about 330, between about 330 and about 320, between about 320 and about 310, between about 310 and about 300, between about 300 and about 290, between about 290 and about 280, between about 280 and about 270, between about 270 and about 260, between about 260 and about 250, between about 250 and about 240, between about 240 and about 230, between about 230 and about 220, between about 220 and about 210, between about 210 and about 200, between about 200 and about 190, between about 190 and about 180, between about 180 and about 170, between about 170 and about 160, between about 160 and about 150, between about 150 and about 140, between about 140 and about 130, between about 130 and about 120, between about 120 and about 110, between about 110 and about 100, between about 100 and about 90, between about 90 and about 80, between about 80 and about 70, between about 70 and about 60, between about 60 and about 50, between about 50 and about 40, between 40 and about 30, between about 30 and about 20, or between about 20 and about 10 amino acids in length.

[0440] In some aspects, a CAR spacer of the present disclosure is between about 400 and about 380, between about 380 and about 360, between about 360 and about 340, between about 340 and about 320, between about 320 and about 300, between about 300 and about 280, between about 280 and about 260, between about 260 and about 240, between about 240 and 220, between about 220 and about 200, between about 200 and about 180, between about 180 and about 160, between about 160 and about 140, between about 120 and about 100, between about 100 and about 80, between about 80 and about 60, between about 60 and about 40, between about 40 and 20, between about 20 and about 10 amino acids in length.

[0441] In some aspects, a CAR spacer of the present disclosure is between about 400 and about 350, between about 350 and about 300, between about 300 and about 250, between about 250 and 200, between about 200 and about 150, between about 150 and about 100, between 100 and about 50, between 50 and about 1 amino acids in length.

[0442] In some aspects, a CAR spacer of the present disclosure is between about 400 and about 300, between about 300 and about 200, between about 200 and about 100, or between about 100 and about 1 amino acids in length.

[0443] In some aspects, a CAR spacer of the present disclosure, e.g., a CAR spacer disclosed in TABLES 1, 3, 5, 7, 9A, 9B, 11, 13, 15, or 17, is about 5, about 10, about 15, about 20, about 25, about 30, about 35, about 40, about 45, about 50, about 55, about 60, about 65, about 70, about 75, about 80, about 85, about 90, about 95, about 100, about 105, about 110, about 115, about 120, about 125, about 130, about 135, about 140, about 145, about 150, about 155, about 160, about 165, about 170, about 175, about 180, about 185, about 190, about 195, about 200, about 205, about 210, about 215, about 220, about 225, about 230, about 235, about 240, about 245, or about 250 angstrom in length.

[0444] In some aspects, a CAR spacer of the present disclosure, e.g., a CAR spacer disclosed in TABLES 1, 3, 5, 7, 9A, 9B, 11, 13, 15, or 17, is between about 5 and about 10, between about 10 and about 15, between about 15 and about 20, between about 20 and about 25, between about 25 and about 30, between about 30 and about 35, between about 35 and about 40, between about 40 and about 45, between about 45 and about 50, between about 50 and about 55, between about 55 and about 60, between about 60 and about 65, between about 65 and about 70, between about 70 and about 75, between about 75 and about 80, between about 80 and about 85, between about 85 and about 90, between about 90 and about 95, between about 95 and about 100, between about 100 and about 105, between about 105 and about 110, between about 110 and about 115, between about 115 and about 120, between about 120 and about 125, between about 125 and about 130, between about 130 and about 135, between about 135 and about 140, between about 140 and about 145, between about 145 and about 150, between about 150 and about 155, between about 155 and about 160, between about 160 and about 165, between about 165 and 170, between about 170 and about 175, between about 175 and about 180, between about 180 and about 185, between about 185 and about 190, between about 190 and about 195, between about 195 and about 200, between about 200 and about 205, between about 205 and about 210, between about 210 and about 215, between about 215 and about 220, between about 220 and about 225, between about 225 and about 230, between about 230 and about 235, between about 235 and about 240, between about 240 and about 245, or about between about 245 and about 250 angstrom in length.

[0445] In some aspects, a CAR spacer of the present disclosure, e.g., a CAR spacer disclosed in TABLES 1, 3, 5, 7, 9A, 9B, 11, 13, 15, or 17, is between about 10 and about 20, between about 20 and about 30, between about 30 and about 40, between about 40 and about 50, between about 50 and about 60, between about 60 and about 70, between about 70 and about 80, between about 80 and about 90, between about 90 and about 100, between about 100 and about 110, between about 110 and about 120, between about 120 and about 130, between about 130 and about 140, between about 140 and about 150, between about 150 and about 160, between about 160 and about 170, between about 170 and about 180, between about 180 and about 190, between about 190 and about 200, between about 200 and about 210, between about 210 and about 220, between about 220 and about 230, between about 230 and about 240, or about between about 245 and about 250 angstrom in length.

[0446] In some aspects, a CAR spacer of the present disclosure, e.g., a CAR spacer disclosed in TABLES 1, 3, 5, 7, 9A, 9B, 11, 13, 15, or 17, is between about 5 and about 25, between about 25 and about 50, between about 50 and about 75, between about 75 and about 100, between about 100 and about 125, between about 125 and about 150, between about 150 and about 175, between about 175 and about 200, between about 200 and about 225, or between about 225 and about 250 angstrom in length.

[0447] In some aspects, a CAR spacer of the present disclosure, e.g., a CAR spacer disclosed in TABLES 1, 3, 5, 7, 9A, 9B, 11, 13, 15, or 17, is less than about 250, less than about 240, less that about 230, less than about 220, less than about 210, less than about 200, less that about 190, less than about 180, less than about 170, less than about 160, less than about 150, less than about 140, less than about 130, less than about 120, less than about 110, less than about 100, less than about 90, less than about 80, less than about 70, less than about 60, less than about 50, less than about 40, less than about 30, less than about 20, or less than about 10 angstrom in length.

[0448] In some aspects, a CAR spacer of the present disclosure comprises an amino acid sequence having at least about 60%, at least about 65%, at least about 70%, at least about 75%, at least about 80%, at least about 85%, at least about 90%, at least about 95%, at least about 96%, at least about 97%, at least about 99%, or about 100% identity to a sequence set forth in TABLES 1, 3, 5, 7, 9A, 9B, 11, 13, 15 or 17.

[0449] In some aspects, a CAR spacer of the present disclosure comprises an amino acid sequence having 1, 2, 3, 4, 5, 6, 7, 8, 9, or 10 amino acid substitutions with respect to a sequence set forth in TABLES 1, 3, 5, 7, 9A, 9B, 11, 13, 15 or 17. In some aspects, cysteine amino acids are replaced with alanine. In some aspects, all the amino acid substitution are conservative amino acid substitutions. In some aspects, at least one amino acid substitution is conservative. In some aspects, at least one amino acid substitution is nonconservative.

[0450] In some aspects, a CAR spacer of the present disclosure comprises a sequence set forth in TABLES 1, 3, 5, 7, 9A, 9B, 11, 13, 15, or 17, wherein the N-terminal amino acid is the N-terminal amino acid of the naturally occurring hinge, and wherein the sequence of TABLES 1, 3, 5, 7, 9A, 9B, 11, 13, 15, or 17, is extended one, two, three, four, five, six, seven, eight, nine or ten amino acids into the corresponding CH1 region (i.e., the naturally occurring CH1 region). In other words the resulting CAR spacer of the present disclosure comprises one, two, three, four, five, six, seven, eight, nine or ten amino acids from the C-terminus of the corresponding CH1 region (e.g., the CH1 region of an IgD for a CAR spacer derived from a IgD hinge) appended to the N-terminus of the sequence of TABLES 1, 3, 5, 7, 9A, 9B, 11, 13, 15, or 17.

[0451] In some aspects, a CAR spacer of the present disclosure comprises a sequence set forth in TABLES 1, 3, 5, 7, 9A, 9B, 11, 13, 15, or 17, wherein the C-terminal amino acid is the C-terminal amino acid of the naturally occurring hinge, and wherein the sequence of TABLES 1, 3, 5, 7, 9A, 9B, 11, 13, 15, or 17, is extended one, two, three, four, five, six, seven, eight, nine or ten amino acids into the corresponding CH2 region (i.e., the naturally occurring CH2 region). In other words the resulting CAR spacer comprises one, two, three, four, five, six, seven, eight, nine or ten amino acids from the N-terminus of the corresponding CH2 region (e.g., the CH2 region of an IgD for a CAR spacer derived from a IgD hinge) appended to the C-terminus of the sequence of TABLES 1, 3, 5, 7, 9A, 9B, 11, 13, 15, or 17.

[0452] In some aspects, a CAR spacer of the present disclosure comprises a sequence set forth in TABLES 1, 3, 5, 7, 9A, 9B, 11, 13, 15, or 17, wherein (i) the N-terminal amino acid is the N-terminal amino acid of the naturally occurring hinge and the C-terminal amino acid is the C-terminal amino acid of the naturally occurring hinge, and (ii) the sequence of TABLES 1, 3, 5, 7, 9A, 9B, 11, 13, 15 or 17, is extended one, two, three, four, five, six, seven, eight, nine or ten amino acids into the corresponding CH1 region (i.e., the naturally occurring CH1 region) and extended one, two, three, four, five, six, seven, eight, nine or ten amino acids into the corresponding CH2 region (i.e., the naturally occurring CH2 region). In other words the resulting CAR spacer comprises one, two, three, four, five, six, seven, eight, nine or ten amino acids from the C-terminus of the corresponding CH1 region (e.g., the CH1 region of an IgD for a CAR spacer derived from a IgD hinge) appended to the N-terminus of the sequence of TABLES 1, 3, 5, 7, 9A, 9B, 11, 13, 15, or 17, and one, two, three, four, five, six, seven, eight, nine or ten amino acids from the N-terminus of the corresponding CH2 region (e.g., the CH2 region of an IgD for a CAR spacer derived from a IgD hinge) appended to the C-terminus of the sequence of TABLES 1, 3, 5, 7, 9A, 9B, 11, 13, 15, or 17.

[0453] In some specific aspects, a CAR spacer of the present disclosure comprises, consists, or consists essentially of a sequence set forth in FIG. 9. The table includes the sequences of exemplary spacers of the present disclosure, their SEQ ID NOs, length (including an optional flexible linker), Ig hinge source, and also the identifier (“Spacer” column) used for each hinge in the drawings and example section of this specification.

[0454] In some specific aspects, a CAR spacer of the present disclosure comprises, consists, or consists essentially of a sequence of an IgAQ1 hinge derived CAR spacer, e.g, Spacer 16 (SEQ ID NO: 4844), Spacer 17 (SEQ ID NO: 4845), Spacer 18 (SEQ ID NO: 4846), or Spacer 19 (SEQ ID NO: 4847), as shown in FIG. 9. In some aspects, the IgAQ1 hinge derived CAR spacer comprises a Gly-Ser linker, e.g., a linker of SEQ ID NO: 4818.

[0455] In some specific aspects, a CAR spacer of the present disclosure comprises, consists, or consists essentially of a sequence of an IgA2 hinge derived CAR spacer, e.g, Spacer 20 (SEQ ID NO: 4848), Spacer 21 (SEQ ID NO: 4849), Spacer 22 (SEQ ID NO: 4850), or Spacer 23 (SEQ ID NO:4851) as shown in FIG. 9. In some aspects, the IgA2 hinge derived CAR spacer comprises a Gly-Ser linker, e.g., a linker of SEQ ID NO: 4818 or 5088.

[0456] In some specific aspects, a CAR spacer of the present disclosure comprises, consists, or consists essentially of a sequence of an IgD hinge derived CAR spacer, e.g, Spacer 24 (SEQ ID NO: 4852), Spacer 25 (SEQ ID NO: 4853), Spacer 26 (SEQ ID NO: 4854), or Spacer 27 (SEQ ID NO: 4855) as shown in FIG. 9. In some aspects, the IgD hinge derived CAR spacer comprises a Gly-Ser linker, e.g., a linker of SEQ ID NO: 4818 or 5088.

[0457] In some specific aspects, a CAR spacer of the present disclosure comprises, consists, or consists essentially of a sequence of an IgE hinge derived CAR spacer, e.g, Spacer 28 (SEQ ID NO:4856) as shown in FIG. 9. In some aspects, the IgE hinge derived CAR spacer comprises a Gly-Ser linker, e.g., a linker of SEQ ID NO: 4818 or 5088.

[0458] In some specific aspects, a CAR spacer of the present disclosure comprises, consists, or consists essentially of a sequence of an IgG1 hinge derived CAR spacer, e.g, Spacer 11 (SEQ ID NO: 4840) or Spacer 10 (SEQ ID NO: 4839) as shown in FIG. 9. In some aspects, the IgG1 hinge derived CAR spacer comprises a Gly-Ser linker, e.g., a linker of SEQ ID NO: 4818 or 5088.

[0459] In some specific aspects, a CAR spacer of the present disclosure comprises, consists, or consists essentially of a sequence of an IgG2, e.g., a human IgG2 hinge, derived CAR spacer, e.g, Spacer 14 (SEQ ID NO:4842) as shown in FIG. 9. In some aspects, the IgG2 hinge derived CAR spacer comprises a Gly-Ser linker, e.g., a linker of SEQ ID NO: 4818 or 5088.

[0460] In some specific aspects, a CAR spacer of the present disclosure comprises, consists, or consists essentially of a sequence of an IgG2 hinge, e.g., a murine IgG2A hinge, derived CAR spacer, e.g, Spacer 1 (SEQ ID NO: 4830), Spacer 2 (SEQ ID NO:4831), Spacer 3 (SEQ ID NO:4832) as shown in FIG. 9. In some aspects, the IgG2 hinge derived CAR spacer comprises a Gly-Ser linker, e.g., a linker of SEQ ID NO: 4818 or 5088.

[0461] In some specific aspects, a CAR spacer of the present disclosure comprises, consists, or consists essentially of a sequence of an IgG2 hinge, e.g., a murine IgG2A hinge, derived CAR spacer, e.g, Spacer 1 (SEQ ID NO: 4830), Spacer 2 (SEQ ID NO:4831), Spacer 3 (SEQ ID NO:4832), as shown in FIG. 9, wherein the IgG2 hinge is a hinge region from IgG2A (Uniprot P01865). In some aspects, the CAR spacer comprises a 6-mer, 7-mer, 8-mer, 9-mer, 10-mer, 11-mer, 12-mer or 13-mer amino acid subsequence of a murine IgG2A hinge of SEQ ID NO: 4860 (EPRGPTIKPCPPC). In some aspects, the CAR spacer derived from the murine IgG2A hinge of SEQ ID NO: 4860, further comprises 1, 2, 3, 4, or 5 CH1 amino acids from the murine IgG2A upstream from the hinge sequence (i.e., a VDKKI sequence of SEQ ID NO:4861 or a subsequence thereof), and/or 1, 2, 3, 4, or 5 CH2 amino acids from the murine IgG2A downstream from the hinge sequence (i.e., a KCPAP sequence of SEQ ID NO:4862 or a subsequence thereof). In some aspects, the CAR spacer derived from the murine IgG2A hinge of SEQ ID NO:4860 comprises a KPCPPC (SEQ ID NO:4863) subsequence from the IgG2A hinge and a contiguous KPC subsequence of the CH2 region of murine IgG2 Å, i.e., the CAR spacer has the sequence of Spacer 1. In some aspects, an IgG2 hinge, e.g., a murine IgG2A hinge, derived CAR spacer comprises a Gly-Ser linker, e.g., a linker of SEQ ID NO: 4818 or 5088.

[0462] In some specific aspects, a CAR spacer of the present disclosure comprises, consists, or consists essentially of a sequence of an IgG3 hinge derived CAR spacer, e.g, Spacer 4 (SEQ ID NO: 4844), Spacer 5 (SEQ ID NO: 4834), Spacer 6 (SEQ ID NO: 4835), Spacer 7 (SEQ ID NO: 4836), Spacer 8 (SEQ ID NO: 4837), Spacer 9 (SEQ ID NO: 4838) or Spacer 13 (SEQ ID NO: 4841) as shown in FIG. 9., In some aspects, the IgG3 hinge derived CAR spacer comprises a Gly-Ser linker, e.g., a linker of SEQ ID NO: 4818 or 5088.

[0463] In some specific aspects, a CAR spacer of the present disclosure comprises, consists, or consists essentially of a sequence of an IgM hinge derived CAR spacer, e.g, Spacer 29 (SEQ ID NO:4857), Spacer 30 (SEQ ID NO:4858) or Spacer 31 (SEQ ID NO:4859) as shown in FIG. 9. In some aspects, the IgM hinge derived CAR spacer comprises a Gly-Ser linker, e.g., a linker of SEQ ID NO: 4818 or 5088.

[0464] In some aspects, a CAR spacer of the present disclosure has at least about 70%, at least about 75%, at least about 80%, at least about 85%, at least about 90%, at least about 95%, at least about 96%, at least about 97%, at least about 98%, or at least about 99% sequence identity to a sequence set forth in FIG. 9. In some aspects, a CAR spacer of the present disclosure comprises a sequence identical to any one of the sequences set forth in FIG. 9 except for one, 2, 3, 4, 5, 6, 7, 8, 9, or 10 amino acid substitutions. In some aspects, the amino acid substitutions are conservative amino acid substitutions. In some aspects, the amino acid substitution comprises at least one non-conservative amino acid substitution.

[0465] In some aspects, a CAR spacer of the present disclosure comprises a sequence of any of the spacers of SEQ ID NOS: 4830-4859 (Spacer 1 to 31) disclosed in FIG. 9, wherein the spacer sequence further comprises an optional flexible linker (e.g., the linker of SEQ ID NO:4818 or 5088 set forth in FIG. 9 and its legend). Thus, in some aspects, a CAR spacer of the present disclosure comprises a Spacer sequence disclosed in FIG. 9 and an optional C-terminal or N-terminal flexible linker. For example, in some aspects, a CAR spacer of the present disclosure comprises the sequence set forth in SEQ ID NO: 4882, i.e., Spacer 1 plus a C-terminal linker of SEQ ID NO:4818; the sequence set forth in SEQ ID NO:4883, i.e., Spacer 1 plus an N-terminal linker of SEQ ID NO:4818; or the sequence set forth in SEQ ID NO:4884, i.e., Spacer 1 plus both a C-terminal linker and an N-terminal linker of SEQ ID NO:4818. For example, in some aspects, a CAR spacer of the present disclosure comprises the sequence of Spacer 1 plus a C-terminal linker of SEQ ID NO:5088; the sequence of Spacer 1 plus an N-terminal linker of SEQ ID NO:5088; or the sequence of Spacer 1 plus both a C-terminal linker and an N-terminal linker of SEQ ID NO:5088. In some aspects, any optional flexible linkers (e.g., gly/ser rich linker) disclosed herein can be appended to the C-terminus and/or the N-terminus of any spacer sequence disclosed in FIG. 9.

[0466] In some aspects, a CAR spacer of the present disclosure comprises a functional fragment of a human immunoglobulin hinge region comprising:
[0467] (a) an internal subsequence of a hinge region of an IgAQ1, IgA2, IgD, IgE, IgG1, IgG2 (e.g., human IgG2 or murine IgG2A), IgG3, IgG4, or IgM (e.g., a hinge region from SEQ ID NOS: 4993-5002);
[0468] (b) a C-terminal subsequence of a hinge region IgAQ1, IgA2, IgD, IgE, IgG1, IgG2 (e.g., human IgG2 or murine IgG2A), IgG3, IgG4, or IgM (e.g., a hinge region from SEQ ID NOS: 4993-5002);
[0469] (c) an N-terminal subsequence of a hinge region IgAQ1, IgA2, IgD, IgE, IgG1, IgG2 (e.g., human IgG2 or murine IgG2A), IgG3, IgG4, or IgM (e.g., a hinge region from SEQ ID NOS: 4993-5002);
[0470] (d) a hinge region of an IgAQ1, IgA2, IgD, IgE, IgG1, IgG2 (e.g., human IgG2 or murine IgG2A), IgG3, IgG4, or IgM (e.g., a hinge region from SEQ ID NOS: 4993-5002) extended 1 to 10 amino acids towards the N-terminal CH1 domain and/or C-terminal CH2 domain;
[0471] (e) a subsequence of a hinge region of an IgAQ1, IgA2, IgD, IgE, IgG1, IgG2 (e.g., human IgG2 or murine IgG2A), IgG3, IgG4, or IgM (e.g., a hinge region from SEQ ID NOS: 4993-5002) extended 1 to 10 amino acids towards the N-terminal CH1 domain;
[0472] (f) a subsequence of a hinge region of an IgAQ1, IgA2, IgD, IgE, IgG1, IgG2 (e.g., human IgG2 or murine IgG2A), IgG3, IgG4, or IgM (e.g., a hinge region from SEQ ID NOS: 4993-5002) extended 1 to 10 amino acids towards the C-terminal CH2 domain;
[0473] (g) a sequence comprising 2 or more repeats of (a)-(f);
[0474] (h) a combination of (a)-(g) corresponding to the same hinge region;
[0475] (h) a combination of (a)-(g) corresponding to different hinge regions; or,
[0476] (i) any combination thereof.

[0477] In some aspects, the hinge region is a murine hinge region.

[0478] In some aspects, ae CAR spacers disclosed herein comprises, consists essentially of, or consists of the sequence set forth in SEQ ID NO: 4831, which is capable of linking an antigen-binding domain that specifically binds to ROR1 with a transmembrane domain.

[0479] In some aspects, the present disclosure provides an anti-ROR1 CAR-expressing cell, e.g., CART, e.g., a cell expressing an anti-ROR1 CAR construct or encoded by a ROR1 binding CAR comprising a scFv, CDRs, or VH and VL chains, wherein the anti-ROR1 CAR comprises a CAR spacer of the present disclosure. An anti-ROR1 CAR-expressing cell, e.g., CART can be generated by engineering a ROR1 CAR that comprises a ROR1 binding domain and a CAR spacer of the present disclosure into a cell (e.g., a T cell or NK cell), e.g., for administration to a subject in need thereof.

[0480] In some aspects, the ROR1 CAR comprises a sequence set forth in SEQ ID NO: 5070 in which the spacer (subsequence between positions 268 and 281 set forth in SEQ ID NO:4867) has been substituted by a spacer sequence disclosed herein. In some aspects, the spacer sequence replacing the subsequence between positions 268 and 281 in SEQ ID NO:5070 is selected from the group consisting of SEQ ID NOS:4830 to 4859 (Spacer 1 to Spacer 31). In some aspects, the spacer sequence of SEQ ID NO:4830 to 4859 further comprises an optional N-terminal and/or C-terminal linker sequence of SEQ ID NO:4818. In some aspects, the subsequence between position 268 and 281 in in SEQ ID NO:5070 is replaced with Spacer 1 (SEQ ID NO:4830). In some aspects, the ROR1 CAR comprises a CAR sequence disclosed in TABLE 21. In some aspects, the ROR1 CAR-T comprises a CAR sequence disclosed in TABLE 21. In some aspects, the ROR1 CAR comprises a CAR sequence set forth in any of SEQ ID NOS: 5072, 5073, 5074, or 5075. In some aspects, the ROR1 CAR-T comprises a CAR sequence set forth in any of SEQ ID NOS: 5072, 5073, 5074, or 5075.

[0481] Non limiting exemplary ROR1-binding domains can be found at TABLE 19, e.g., R12 antibody. Accordingly, in some aspects, the ROR1 CAR comprises a binding moiety derived from antibodies R12, R11, or 2A2 (see TABLE 19). In some aspects, the ROR1 CAR comprises a binding moiety derived from the R12 antibody and a spacer disclosed herein, e.g., Spacer 1 or any of the spacers disclosed in FIG. 9. In some aspects, the ROR1 CAR comprises a binding moiety derived from the R11 antibody and a spacer disclosed herein, e.g., Spacer 1 or any of the spacers disclosed in FIG. 9. In some aspects, the ROR1 CAR comprises a binding moiety derived from the 2A2 antibody and a spacer disclosed herein, e.g., Spacer 1 or any of the spacers disclosed in FIG. 9.

[0482] In some aspects, the present disclosure provides an anti-CD19 CAR-expressing cell, e.g., CART, e.g., a cell expressing an anti-CD19 CAR construct or encoded by a CD19 binding CAR comprising a scFv, CDRs, or VH and VL chains, wherein the anti-CD19 CAR comprises a CAR spacer of the present disclosure. An anti-CD19 CAR-expressing cell, e.g., CART can be generated by engineering a CD19 CAR that comprises a CD19 binding domain and a CAR spacer of the present disclosure into a cell (e.g., a T cell or NK cell), e.g., for administration to a subject in need thereof.

[0483] In some aspects, the present disclosure provides an anti-CD19 CAR comprising a spacer disclosed herein. In some aspects, the FMC63 CAR comprises a sequence set forth in SEQ ID NO:5076 in which the spacer (subsequence from positions 266 to 277 set forth in SEQ ID NO:4876) has been substituted by a spacer sequence disclosed herein. In some aspects, the spacer sequence replacing the subsequence between positions 266 and 277 in SEQ ID NO:5076 is selected from the group consisting of SEQ ID NOS:4830 to 4859 (Spacer 1 to Spacer 31). In some aspects, the spacer sequence of SEQ ID NO:4830 to 4859 further comprises an optional N-terminal and/or C-terminal linker sequence of SEQ ID NO:4818. In some aspects, the subsequence between position 266 and 277 in SEQ ID NO:5076 is replaced with Spacer 1 (SEQ ID NO:4830). In some aspects, the anti-CD19 CAR comprises a CAR sequence disclosed in TABLE 23. In some aspects, the anti-CD19 CAR-T comprises a CAR sequence disclosed in TABLE 23. In some aspects, the anti-CD19 CAR comprises a CAR sequence set forth in any of SEQ ID NOS: 4918, 4919, 4920, 4921, 4922, 4923, 4924, or 4925.. In some aspects, the anti-CD19 CAR comprises a CAR spacer sequence comprising, consisting, or consisting essentially of a sequence set forth in SEQ ID NOs: 4836, 4837, 4838, 4839, 4840, 4842, 4844, or 4856.

[0484] In some aspects, the present disclosure provides an anti-Her2 CAR-expressing cell, e.g., CAR-T, e.g., a cell expressing an anti-Her2 CAR construct or encoded by a Her2 binding CAR comprising a scFv, CDRs, or VH and VL chains, wherein the anti-Her2 CAR comprises a CAR spacer of the present disclosure. An anti-Her2 CAR-expressing cell, e.g., CART can be generated by engineering a Her2 CAR that comprises a Her2 binding domain and a CAR spacer of the present disclosure into a cell (e.g., a T cell or NK cell), e.g., for administration to a subject in need thereof.

[0485] In some aspects, the present disclosure provides an anti-Her2 CAR comprising a spacer disclosed herein. In some aspects, the anti-Her2 CAR comprises a CAR sequence disclosed in TABLE 24. In some aspects, the anti-Her2 CAR comprises a sequence set forth in SEQ ID NOS:5005, 5006, 5007 or 5008. In some aspects, the anti-Her2 CAR comprises a sequence set forth in SEQ ID NOS:5005, 5006, 5007 or 5008, in which the scFv linker sequence of SEQ ID NO: 5003 has been replaced with the scFv linker sequence of SEQ ID NO: 5004. In some aspects, the anti-Her2 CAR comprises a CAR spacer sequence comprising, consisting, or consisting essentially of a sequence set forth in SEQ ID NOs: 4835, 4836, 4837, or 4844.

[0486] In some aspects, the CAR (e.g., an anti-ROR1 CAR, an anti-CD19 CAR, or an anti-Her2 CAR disclosed herein) comprises an optional leader sequence (e.g., an optional leader sequence described herein), an extracellular antigen-binding domain, a CAR spacer of the present disclosure (e.g., a hinge region derived CAR spacer described herein), a transmembrane domain (e.g., transmembrane domain described herein), and an intracellular stimulatory domain (e.g., intracellular stimulatory domain described herein).

[0487] In some aspects, an exemplary CAR construct (e.g., an anti-ROR1 CAR, an anti-CD19 CAR or anti-Her2 CAR disclosed herein) comprises an optional leader sequence (e.g., a leader sequence described herein), an extracellular antigen-binding domain, a CAR spacer of the present disclosure (e.g., a hinge or hinge and constant region derived CAR spacer described herein), a transmembrane domain, an intracellular costimulatory domain (e.g., an intracellular costimulatory domain described herein) and an intracellular stimulatory domain.

[0488] In some aspects, the present disclosure encompasses a recombinant nucleic acid construct comprising a nucleic acid molecule encoding a CAR (e.g., an anti-ROR1 CAR, an anti-CD19 CAR, or an anti-Her2 CAR disclosed herein), wherein the nucleic acid molecule comprises the nucleic acid sequence encoding a binding domain (e.g., a ROR1-binding domain in an anti-ROR1 CAR of the present disclosure, or a CD19-binding domain in an anti-CD19 CAR disclosed herein, or a Her2-binding domain of an anti-Her2 CAR disclosed herein), e.g., that is contiguous with and in the same reading frame as a nucleic acid sequence encoding an intracellular signaling domain. An exemplary intracellular signaling domain that can be used in the CAR includes, but is not limited to, one or more intracellular signaling domains of, e.g., CD3-zeta, CD28, 4-1BB, and the like. In some aspects, the CAR (e.g., an anti-ROR1 CAR, an anti-CD19 CAR, or an anti-Her2 CAR disclosed herein) can comprise any combination of CD3-zeta, CD28, 4-1BB, and the like.

[0489] In some aspects, the binding domain (e.g., a ROR1-binding domain in an anti-ROR1 CAR of the present disclosure, or a CD19-binding domain in an anti-CD19 CAR disclosed herein, or a Her2-binding domain of an anti-Her2 CAR disclosed herein) is characterized by particular functional features or properties of an antibody or antigen-binding antibody fragment. For example, in some aspects, the portion of a CAR composition of the disclosure that comprises an antigen-binding domain specifically binds a human antigen or a fragment thereof (e.g., a human ROR1-binding domain in an anti-ROR1 CAR of the present disclosure, or a human CD19-binding domain in an anti-CD19 CAR disclosed herein, or a Her2-binding domain of an anti-Her2 CAR disclosed herein). In certain aspects, the scFv is contiguous with and in the same reading frame as a leader sequence.

[0490] In some aspects, the binding domain (e.g., a ROR1-binding domain in an anti-ROR1 CAR of the present disclosure, or a CD19-binding domain in an anti-CD19 CAR disclosed herein, or a Her2-binding domain of an anti-Her2 CAR disclosed herein) is a fragment, e.g., a single chain variable fragment (scFv). In some aspects, the binding domain (e.g., a ROR1-binding domain in an anti-ROR1 CAR of the present disclosure, or a CD19-binding domain in an anti-CD19 CAR disclosed herein, or a Her2-binding domain of an anti-Her2 CAR disclosed herein) is a Fv, a Fab, a (Fab′)2, or a bi-functional (e.g. bi-specific) hybrid antibody (e.g., Lanzavecchia et al., Eur. J. Immunol. 17, 105 (1987)). In some aspects, the antibodies and fragments thereof of the disclosure, used to generate a CAR of the present disclosure, binds their target protein (e.g., ROR1, CD19 or Her2) or a fragment thereof with wild-type or enhanced affinity. In some instances, a human scFv used in a CAR of the present disclosure can be derived from a display library.

### Modular Ig Derived Spacers

[0491] The present disclosure also provide a polypeptide encoding a “modular CAR spacer,” i.e., a CAR spacer comprising several repetitions of a polypeptide unit. This specific type of CAR spacer of the present disclosure allows tailoring the length of a spacer to optimally position the CAR antigen-binding domain with respect to the epitope of a tumor antigen expressed on a target cell. The modular CAR spacers disclosed herein can be generated by concatenating two or more polypeptides disclosed herein (e.g., hinge region derived CAR spacers, loop region derived CAR spacers, or combinations thereof). In a particular aspect, the modular CAR can be generated by concatenating sequences derived from the IgG3 hinge region and/or polypeptide sequences comprising motifs identified in the IgG3 hinge region.

[0492] Accordingly, the present disclosure provides a polynucleotide encoding a CAR comprising (i) an antigen-binding domain that binds to an epitope on a tumor antigen expressed on a target cell; (ii) a transmembrane domain; (iii) an intracellular domain; and (iv) a modular CAR spacer of the present disclosure located between the antigen-binding domain and the transmembrane domain comprising an amino acid sequence derived from a human immunoglobulin hinge region or a functional fragment thereof, wherein the CAR spacer of the present disclosure comprises an amino acid sequence of formula C_{N}—(X₁PRX₂P)ₘ-[L-(X₁PRX₂P)]ₙ-C_{C} wherein (i) the modular CAR spacer is located between the ligand-binding domain and the transmembrane domain of the CAR; (ii) the modular CAR spacer has a length of at least 15 amino acids; (iii) m is an integer selected from 0 or 1; (iv) n is an integer between 1 to 20; (v) L is a linker polypeptide sequence; (vi) CN is an optional N-terminal capping sequence; (vii) Cc is an optional C-terminal capping sequence; and, (viii) X₁ and X₂ are independently selected from cysteine, glycine, alanine, or serine.

[0493] In some aspects, the modular CAR spacer comprises two, three, four, five, or six X₁PRX₂P motifs. In some aspects, X₁PRX₂P comprises at least one cysteine. In some aspects X₁PRX₂P is SEQ ID NO: 4749 (CPRCP). In some aspects, L comprises a polypeptide of SEQ ID NO: 4185 or a fragment or variant thereof. In some aspects, when n>1, all L are identical. In some aspects, when n>1, at least one L is different from the other L. In some aspects CN comprises a polypeptide of SEQ ID NO: 4088 or a fragment or variant thereof. In some aspects, Cc comprises a polypeptide of SEQ ID NO: 4453 or a fragment or variant thereof.

[0494] In some aspects, the modular CAR spacer comprises the sequence of formula (CPRCP)ₒ(EPKSCDTPPPCPRCP)ₚ, wherein o is an integer which is 0 or 1, and p is an integer which is 1, 2 or 3.

[0495] In some aspects, the modular CAR spacer comprises an amino acid sequence selected the group consisting of SEQ ID NOS: 2903; 2983; 3358; 3728; and, 3958.

[0496] In some aspects, the modular CAR spacer comprises a Cc capping sequence comprising a subsequence of the polypeptide of SEQ ID NO: 4453 or a fragment or variant thereof. In some aspects, the subsequence of the polypeptide of SEQ ID NO: 4453 is the N-terminal AP. In some aspects, the modular CAR spacer comprises an amino acid sequence selected from the group consisting of SEQ ID NOS: 4750; 4751; 4752; 4753; and, 4754.

[0497] In some aspects, the modular CAR spacer comprises a CN capping sequence comprising a subsequence of the polypeptide of SEQ ID NO: 4088 or a fragment or variant thereof. In some aspects, the modular CAR spacer comprises the amino acid sequence of SEQ ID NO: 4811.

[0498] In some aspects, the present disclosure provides a polynucleotide encoding a CAR comprising (i) an antigen-binding domain that binds to an epitope on a tumor antigen expressed on a target cell; (ii) a transmembrane domain; (iii) an intracellular domain; and (iv) a modular CAR spacer located between the antigen-binding domain and the transmembrane domain comprising an amino acid sequence derived from a human immunoglobulin hinge region or a functional fragment thereof, wherein the spacer comprises an amino acid sequence of formula (EX₃KX₄X₅X₆X₇DTX₈X₉X₁₀TCPRCP)q (SEQ ID NO: 4812) wherein q is an integer between 1 and 10, and wherein: X₃ is L or P; X₄ is T or S; X₅ is P or C; X₆ is L, or none; X₇ is G, or none; X₅ is T or P; X₉ is H or P; and, X₁₀ is T or P.

[0499] The present disclosure also provides a polynucleotide encoding a CAR comprising (i) an antigen-binding domain that binds to an epitope on a tumor antigen expressed on a target cell; (ii) a transmembrane domain; (iii) an intracellular domain; and, (iv) a modular CAR spacer located between the antigen-binding domain and the transmembrane domain comprising an amino acid sequence derived from a human immunoglobulin hinge region or a functional fragment thereof, wherein the modular CAR spacer comprises at least one amino acid sequence A of SEQ ID NO: 4466 and/or at least one amino acid sequence B of SEQ ID NO: 4477, wherein the amino acid sequence of the CAR spacer corresponds, e.g., to the formula AB, ABB, ABBB, ABBBB, A, B, BA, AA, BAB, BAA, AAA, ABA, BBB, AABB, AAAB. In some aspects, the modules (sequence A and sequence B) are concatenated via an amino bond between the C-terminal amino acid in a module and the N-terminal amino acid in the following module.

[0500] In some aspects, the modular CAR spacer of the present disclosure corresponds to the formula {[A/B]-(L1)-[A/B]-(L2)]}n wherein A/B is an amino sequence A of SEQ ID NO: 4466 or an amino acid sequence B of SEQ ID NO: 4477; L1 and L2 are optional linkers (e.g., Gly-Ser linkers such as the linker of SEQ ID NO: 4818 or 5088); and, n is an integer between 1 and 100.

[0501] Exemplary modular CAR spacers derived from IgG3 comprising combination of sequence A set forth in SEQ ID NO: 4466 and/or sequence B set forth in SEQ ID NO: 4477, are set forth in SEQ ID NOs:4466-4518.

[0502] In some aspects, the L1 and/or L2 optional linker is a peptide linker. In some aspects, the L1 and/or L2 optional linker can comprise at least about two, at least about three, at least about four, at least about five, at least about 10, at least about 15, at least about 20, at least about 25, at least about 30, at least about 35, at least about 40, at least about 45, at least about 50, at least about 55, at least about 60, at least about 65, at least about 70, at least about 75, at least about 80, at least about 85, at least about 90, at least about 95, at least about 100, at least about 110, at least about 120, at least about 130, at least about 140, at least about 150, at least about 160, at least about 170, at least about 180, at least about 190, or at least about 200 amino acids. In some aspects, the L1 and/or L2 optional linker is a glycine/serine (Gly-Ser) linker as described below.

[0503] In some aspects, a modular CAR spacer of the present disclosure is about 15 amino acids, about 30 amino acids, about 45 amino acids, about 60 amino acids, about 75 amino acids, about 90 amino acids, about 105 amino acids, about 120 amino acids, about 135 amino acids, about 150 amino acids, about 165 amino acids, about 180 amino acids, about 195 amino acids, about 210 amino acids, about 225 amino acids, about 240 amino acids, about 255 amino acids, about 270 amino acids, about 285 amino acids, about 300 amino acids in length.

[0504] In some aspects, a modular CAR spacer of the present disclosure is between about 10 and about 15, between about 15 and about 20, between about 20 and 25, between about 25 and about 30, between about 30 and about 35, between about 35 and about 40, between about 40 and about 45, between about 45 and about 50, between about 50 and about 55, between about 55 and about 60, between about 60 and about 65, between about 65 and about 70, between about 70 and about 75, between about 75 and about 80, between about 80 and about 85, between about 85 and about 90, between about 95 and about 100, between about 100 and about 105, between about 105 and about 110, between about 110 and about 115, between about 115 and about 120, between about 120 and about 125, between about 125 and about 130, between about 130 and about 135, between about 135 and about 140, between about 140 and about 145, between about 145 and about 150, between about 150 and about 155, between about 155 and about 160, between about 160 and about 165, between about 165 and about 170, between about 170 and about 175, between about 175 and 180, between about 180 and about 185, between about 185 and about 190, between about 190 and about 196, between about 195 and about 200, between about 200 and about 205, between about 205 and about 210, between about 210 and about 215, between about 215 and about 220, between about 220 and about 225, between about 225 and about 230, between about 230 and about 235, between about 235 and about 240, between about 240 and about 245, between about 245 and about 250, between about 250 and about 255, between about 255 and about 260, between about 260 and about 265, between about 265 and about 270, between about 270 and about 275, between about 275 and about 280, between about 280 and about 285, between about 285 and about 290, between about 290 and about 295, or between about 295 and about 300 amino acids in length.

### Linkers

[0505] In some aspects, any CAR spacer of the present disclosure (e.g., any CAR spacer disclosed in TABLES 1, 3, 5, 7, 9A, 9B, 11, 13, 15, or 17, optionally comprising N- and C-terminal sequences disclosed in TABLES 2, 4, 6, 8, 10A, 10B, 12, 14, 16, or 18, or any modular CAR spacer disclosed herein) can comprise an optional N-terminal linker and/or an optional C-terminal linker. Flexible linker sequences known the art can be used as optional linkers. In some aspects, the linker is a glycine/serine linker. As used herein, term “glycine/serine” is used interchangeably with the term “Gly/Ser” and refers to a linker sequence comprising repeats of the amino acids glycine (G, Gly) and/or serine (S, Ser) as exemplified below.

[0506] In some aspects, the optional linker is a glycine/serine linker according to the formula [(Gly)n-Ser]m (SEQ ID NO: 4813) where n is any integer from 1 to 100 and m is any integer from 1 to 100. In other aspects, the glycine/serine linker is according to the formula [(Gly)x-Sery]z (SEQ ID NO: 4814) wherein x in an integer from 1 to 4, y is 0 or 1, and z is an integers from 1 to 50. In some aspects, the optional linker comprises the sequence Gn (SEQ ID NO: 4815), where n can be an integer from 1 to 100. In some aspects, the optional linker can comprise the sequence (GlyAla)n (SEQ ID NO: 4816), wherein n is an integer between 1 and 100.

[0507] In some aspects, the sequence of the optional linker has the sequence set forth in SEQ ID NO: 4817. In some aspects, the sequence of the optional linker is GGGSG (SEQ ID NO: 4818). In some aspects, the sequence of the optional linker is GGGGSG (SEQ ID NO: 5088).

[0508] In other aspects, the optional linker comprises the sequence set forth in SEQ ID NO: 4819. In other aspects, the optional linker comprises the sequence set forth in SEQ ID NO:4820. In other aspects, the optional linker can comprise the sequence set forth in SEQ ID NO: 4821. In other aspects, the optional linker can comprise the sequence set forth in SEQ ID NO: 4822. In these instances, n can be an integer from 1 to 100. In other instances, n can be an integer from one to 20, i.e., 1, 2, 3, 4, 5, 6, 7, 8, 9, 10, 11, 12, 13, 14, 15, 16, 17, 18, 19, or 20. In some aspects n is an integer from 1 to 100.

[0509] Examples of the optional linker include, but are not limited to, e.g., the sequences set forth in SEQ ID NOS: 4823, 4824, 4825, 4826, 4827, 4828, or 4829.

[0510] In some aspects, the optional linker comprises the sequence PGG. In some aspects, the optional linker comprises additional amino acids in addition to Glycine and Serine. In some aspects, the optional linker comprises 1, 2, 3, 4, or 5 non-gly/non-ser amino acids. In some aspects, the Gly/Ser-linker comprises at least about 60%, at least about 65%, at least about 70%, at least about 80%, at least about 85%, at least about 90%, or at least 95% glycine or serine amino acids.

[0511] In some specific aspects, the optional linker is between 1 and 10 amino acids in length. In some aspects, the optional linker as between about 5 and about 10, between about 10 and about 20, between about 20 and about 30, between about 30 and about 40, between about 40 and about 50, between about 50 and about 60, between about 60 and about 70, between about 70 and about 80, between about 80 and about 90, or between about 90 and about 100 amino acids in length.

### Rational Design of Ig Derived CAR Spacers

[0512] In some aspects, the present disclosure provides Ig derived CAR spacers selected to position the antigen-binding portion of the CAR at an optimal distanced or in an optimal position to interact with the an epitope located on the target protein. As represented schematically in FIG. 7, it is possible to estimate the optimal length of a CAR spacer, e.g., by having an estimate or measurement of the distance between the epitope at the surface of the target cell, and an estimate or measurement of the signaling synapse, i.e., the distance between the surface of the cell expressing the CAR (e.g., a CART cell) and the surface of the target cell.

[0513] In some aspects, the calculation can assume that the width of the signaling synapse is approximately 150 angstroms. In some aspects, the distance between the epitope and the surface of the target cell membrane can be estimated, e.g., using x-ray crystallography, NMR, or cryo-EM structure. In other aspects, the distance between the epitope and the surface of the target cell membrane can be estimated, e.g., using spectroscopic techniques, for example, using Fluorescence Resonance Energy Transfer (FRET).

[0514] In some aspect, the estimates can be used to select a subset of candidate CAR spacer sequences for screening. These sequences can be subsequently screened as described in the Examples section of the present application in order to determine, e.g, which spacer (and, therefore, spacer lengths) result in increased cytokine secretion or target cell lysis.

[0515] In some aspects, the present disclosure provides a polynucleotide encoding a CAR comprising (i) an antigen-binding domain that binds to an epitope on a tumor antigen expressed on a target cell; (ii) a transmembrane domain; (iii) an intracellular domain; and, (iv) a CAR spacer of the present disclosure located between the antigen-binding domain and the transmembrane domain comprising an amino acid sequence derived from a human immunoglobulin hinge region or a functional fragment thereof, wherein
[0516] (a) the CAR spacer of the present disclosure is between about 150 amino acids and about 125 amino acids in length; and, the distance between the epitope and the surface of the target cell membrane is less than about 10 Å;
[0517] (b) the CAR spacer of the present disclosure is between about 125 amino acids and about 100 amino acids in length; and, the distance between the epitope and the surface of the target cell membrane is less than about 10 Å;
[0518] (c) the CAR spacer of the present disclosure is between about 100 amino acids and about 75 amino acids in length; and, the distance between the epitope and the surface of the target cell membrane is less than about 10 Å;
[0519] (d) the CAR spacer of the present disclosure is between about 75 amino acids and about 36 amino acids in length; and, the distance between the epitope and the surface of the target cell membrane is less than about 15 Å;
[0520] (e) the CAR spacer of the present disclosure is between about 35 amino acids and about 21 amino acids in length; and, the distance between the epitope and the surface of the target cell membrane is between about 15 Å and about 25 Å;
[0521] (f) the CAR spacer of the present disclosure is between about 20 amino acids and about 16 amino acids in length; and, the distance between the epitope and the surface of the target cell membrane is between about 25 Å and about 35 Å;
[0522] (g) the CAR spacer of the present disclosure is between about 15 amino acids and about 11 amino acids in length; and, the distance between the epitope and the surface of the target cell membrane is between about 35 Å and about 45 Å; or,
[0523] (h) the CAR spacer of the present disclosure is between about 10 amino acids and about 5 amino acids in length; and, the distance between the epitope and the surface of the target cell membrane is more than about 45 Å.

[0524] In some aspects, the present disclosure provides a polynucleotide encoding a CAR comprising (i) an antigen-binding domain that binds to an epitope on a tumor antigen expressed on a target cell; (ii) a transmembrane domain; (iii) an intracellular domain; and, (iv) a CAR spacer of the present disclosure located between the antigen-binding domain and the transmembrane domain comprising an amino acid sequence derived from a human immunoglobulin hinge region or a functional fragment thereof, wherein
[0525] (a) the CAR spacer of the present disclosure is between about 600 Å and about 500 Å in length; and, the distance between the epitope and the surface of the target cell membrane is less than about 10 Å;
[0526] (b) the CAR spacer of the present disclosure is between about 500 Å and about 400 Å in length; and, the distance between the epitope and the surface of the target cell membrane is less than about 10 Å;
[0527] (c) the CAR spacer of the present disclosure is between about 400 Å and about 300 Å in length; and, the distance between the epitope and the surface of the target cell membrane is less than about 10 Å;
[0528] (d) the CAR spacer of the present disclosure is between about 300 Å and about 150 Å in length; and, the distance between the epitope and the surface of the target cell membrane is less than about 15 Å;
[0529] (e) the CAR spacer of the present disclosure is between about 150 Å and about 80 Å in length; and, the distance between the epitope and the surface of the target cell membrane is between about 15 Å and about 25 Å;
[0530] (f) the CAR spacer of the present disclosure is between about 80 Å and about 60 Å in length; and, the distance between the epitope and the surface of the target cell membrane is between about 25 Å and about 35 Å;
[0531] (g) the CAR spacer of the present disclosure is between about 60 Å and about 40 Å in length; and, the distance between the epitope and the surface of the target cell membrane is between about 35 Å and about 45 Å; or,
[0532] (h) the CAR spacer of the present disclosure is between about 40 Å and about 20 Å in length; and, the distance between the epitope and the surface of the target cell membrane is more than about 45 Å.

[0533] In some aspects, the distance between the epitope and the surface of the target cell membrane is less than about 10 Å and the spacer is 125, 126, 127, 128, 129, 130, 131, 132, 133, 134, 135, 136, 137, 138, 139, 140, 141, 142, 143, 144, 145, 146, 147, 148, 149 or 150 amino acids in length. In some aspects, the distance between the epitope and the surface of the target cell membrane is less than about 10 Å and the spacer is about 500, about 510, about 520, about 530, about 540, about 550, about 560, about 570, about 580, about 590, or about 600 Å in length.

[0534] In some aspects, the distance between the epitope and the surface of the target cell membrane is less than about 10 Å and the spacer is 100, 101, 102, 103, 104, 105, 106, 107, 108, 109, 110, 111, 112, 113, 114, 115, 116, 117, 118, 119, 120, 121, 122, 123, 124 or 125 amino acids in length. In some aspects, the distance between the epitope and the surface of the target cell membrane is less than about 10 Å and the spacer is about 400, about 410, about 420, about 430, about 440, about 450, about 460, about 470, about 480, about 490, or about 500 Å in length.

[0535] In some aspects, the distance between the epitope and the surface of the target cell membrane is less than about 10 Å and the spacer is 75, 76, 77, 78, 79, 80, 81, 82, 83, 84, 85, 86, 87, 88, 89, 90, 91, 92, 93, 94, 95, 96, 97, 98, 99 or 100 amino acids in length. In some aspects, the distance between the epitope and the surface of the target cell membrane is less than about 10 Å and the spacer is about 300, about 310, about 320, about 330, about 340, about 350, about 360, about 370, about 380, about 390, or about 400 Å in length.

[0536] In some aspects, the distance between the epitope and the surface of the target cell membrane is less than about 15 Å and the spacer is 36, 37, 38, 39, 40, 41, 42, 43, 44, 45, 46, 47, 48, 49, 50, 51, 52, 53, 54, 55, 56, 57, 58, 59, 60, 61, 62, 63, 64, 65, 66, 67, 68, 69, 70, 71, 72, 73, 74 or 75 amino acids in length. In some aspects, the distance between the epitope and the surface of the target cell membrane is less than about 15 Å and the spacer is about 150, about 160, about 170, about 180, about 190, about 200, about 210, about 220, about 230, about 240, about 250, about 260, about 270, about 280, about 290 or about 300 Å in length.

[0537] In some aspect, the distance between the epitope and the surface of the target cell membrane is between about 15 Å and about 25 Å and the spacer is 21, 22, 23, 24, 25, 26, 27, 28, 29, 30, 31, 32, 33, 34 or 35 amino acids in length. In some aspect, the distance between the epitope and the surface of the target cell membrane is between about 15 Å and about 25 Å and the spacer is about 80, about 90, about 100, about 110, about 120, about 130, about 140 or about 150 Å in length.

[0538] In some aspects, the distance between the epitope and the surface of the target cell membrane is between about 25 Å and about 35 Å and the spacer is 16, 17, 18, 19 or 20 amino acids in length. In some aspects, the distance between the epitope and the surface of the target cell membrane is between about 25 Å and about 35 Å and the spacer is about 60, about 65, about 70, about 75 or about 80 Å in length.

[0539] In some aspects, the distance between the epitope and the surface of the target cell membrane is between about 35 Å and about 45 Å and the spacer is 11, 12, 13, 14, or 15 amino acids in length. In some aspects, the distance between the epitope and the surface of the target cell membrane is between about 35 Å and about 45 Å and the spacer is about 40, about 45, about 50, about 55 or about 60 Å in length.

[0540] In some aspects, the distance between the epitope and the surface of the target cell membrane is more than about 45 Å and the spacer is 5, 6, 7, 8, 9 or 10 amino acids in length. In some aspects, the distance between the epitope and the surface of the target cell membrane is more than about 45 Å and the spacer is about 20, about 25, about 30, about 35, or about 40 Å in length.

[0541] Also provided is a polynucleotide encoding a CAR comprising (i) an antigen-binding domain that binds to an epitope on a tumor antigen expressed on a target cell; (ii) a transmembrane domain; (iii) an intracellular domain; and, (iv) a CAR spacer of the present disclosure located between the antigen-binding domain and the transmembrane domain comprising an amino acid sequence derived from a human immunoglobulin hinge region or a functional fragment thereof, wherein
[0542] (a) the CAR spacer of the present disclosure is between about 450 Å and about 375 Å in length; and, the distance between the epitope and the surface of the target cell membrane is less than about 10 Å;
[0543] (b) the CAR spacer of the present disclosure is between about 375 Å and about 300 Å in length; and, the distance between the epitope and the surface of the target cell membrane is less than about 10 Å;
[0544] (c) the CAR spacer of the present disclosure is between about 300 Å and about 225 Å in length; and, the distance between the epitope and the surface of the target cell membrane is less than about 10 Å;
[0545] (d) the CAR spacer of the present disclosure is between about 225 Å and about 100 Å in length; and, the distance between the epitope and the surface of the target cell membrane is less than about 15 Å;
[0546] (e) the CAR spacer of the present disclosure is between about 100 Å and about 60 Å in length; and, the distance between the epitope and the surface of the target cell membrane is between about 15 Å and about 25 Å;
[0547] (f) the CAR spacer of the present disclosure is between about 60 Å and about 45 Å in length; and, the distance between the epitope and the surface of the target cell membrane is between about 25 Å and about 35 Å;
[0548] (g) the CAR spacer of the present disclosure is between about 45 Å and about 30 Å in length; and, the distance between the epitope and the surface of the target cell membrane is between about 35 Å and about 45 Å; or,
[0549] (h) the CAR spacer of the present disclosure is between about 30 Å and about 15 Å in length; and, the distance between the epitope and the surface of the target cell membrane is more than about 45 Å.

[0550] In some aspects, the distance between the epitope and the surface of the target cell membrane is less than about 10 Å and the spacer is about 450 Å, about 440 Å, about 430 Å, about 420 Å, about 410 Å, about 400 Å, about 390 Å, about 380 Å or about 375 Å in length. In some aspects, the distance between the epitope and the surface of the target cell membrane is less than about 10 Å and the spacer is about 375 Å, about 370 Å, about 360 Å, about 350 Å, about 340 Å, about 330 Å, about 320 Å, about 310 Å, or about 300 Å in length. In some aspects, the distance between the epitope and the surface of the target cell membrane is less than about 10 Å and the spacer is about 300 Å, about 290 Å, about 280 Å, about 270 Å, about 260 Å, about 250 Å, about 240 Å, about 230 Å, or about 225 Å in length. In some aspects, the distance between the epitope and the surface of the target cell membrane is less than about 15 Å the spacer is about 225 Å, about 220 Å, about 210 Å, about 200 Å, about 190 Å, about 180 Å, about 170 Å, about 160 Å, about 150 Å, about 140 Å, about 130 Å, about 120 Å, about 110 Å, or about 100 Å in length. In some aspects, the distance between the epitope and the surface of the target cell membrane is between about 15 Å and about 25 Å and the spacer is about 100 Å, about 95 Å, about 90 Å, about 85 Å, about 80 Å, about 75 Å, about 70 Å, about 65 Å, or about 60 Å in length. In some aspects, the distance between the epitope and the surface of the target cell membrane is between about 25 Å and about 35 Å and the spacer is about 60 Å, about 55 Å, about 50 Å, and about 45 Å in length. In some aspects, the distance between the epitope and the surface of the target cell membrane is between about 35 Å and about 45 Å and the spacer is about 45 Å, about 40 Å, about 35 Å, or about 30 Å in length. In some aspects, the distance between the epitope and the surface of the target cell membrane is more than about 45 Å and the spacer is about 30 Å, about 25 Å, about 20 Å, or about 15 Å in length.

### Antigen-Binding Domains

[0551] In some aspects, the polypeptide encoding a CAR of the present disclosure, i.e., a CAR comprising a CAR spacer of the present disclosure (i.e., a hinge region derived CAR spacer, a loop region derived CAR spacer, or a combination thereof), comprises an antigen-binding domain comprising an antibody or an antigen-binding fragment thereof (e.g., an ScFv) that specifically binds to an epitope on a tumor antigen, e.g., a protein kinase such as a tyrosine protein kinase.

[0552] In some aspects, the tumor antigen is selected from the group consisting of ROR1, HER2, AFP, CD19, TRAC, TCRP, BCMA, CLL-1, CS1, CD38, CD19, TSHR, CD123, CD22, CD30, CD70, CD171, CD33, EGFRvIII, GD2, GD3, Tn Ag, PSMA, ROR2, GPC1, GPC2, FLT3, FAP, TAG72, CD44v6, CEA, EPCAM, B7H3, KIT, IL-13Ra2, mesothelin, IL-1 1Ra, PSCA, PRSS21, VEGFR2, LewisY, CD24, PDGFR-beta, SSEA-4, CD20, folate receptor alpha, ERBB2 (Her2/neu), MUC1, MUC16, EGFR, NCAM, prostase, PAP, ELF2M, Ephrin B2, IGF-I receptor, CAIX, LMP2, gplOO, bcr-abl, tyrosinase, EphA2, Fucosyl GM1, sLe, GM3, TGS5, HMWMAA, o-acetyl-GD2, Folate receptor beta, TEM1/CD248, TEM7R, CLDN6, GPRC5D, CXORF61, CD97, CD179a, ALK, Polysialic acid, PLAC1, GloboH, NY-BR-1, UPK2, HAVCR1, ADRB3, PANX3, GPR20, LY6K, OR51E2, TARP, WTI, NY-ESO-1, LAGE-la, MAGE-Al, legumain, HPV E6, E7, MAGE Al, ETV6-AML, sperm protein 17, XAGE1, Tie 2, MAD-CT-1, MAD-CT-2, Fos-related antigen 1, p53, p53 mutant, prostein, survivin and telomerase, PCTA-1/Galectin 8, MelanA/MARTI, Ras mutant, hTERT, sarcoma translocation breakpoints, ML-IAP, ERG (TMPRSS2 ETS fusion gene), NA17, PAX3, Androgen receptor, Cyclin B1, MYCN, RhoC, TRP-2, CYP1B1, BORIS, SART3, PAX5, OY-TES1, LCK, AKAP-4, SSX2, RAGE-1, human telomerase reverse transcriptase, RU1, RU2, intestinal carboxyl esterase, mut hsp70-2, CD79a, CD79b, CD72, LAIR1, FCAR, LILRA2, CD300LF, CLEC12A, BST2, EMR2, LY75, GPC3, FCRL5, IGLL1, CD2, CD3F, CD4, CD5, CD7, the extracellular portion of the APRIL protein, and any combinations thereof.

[0553] In some aspects, the antigen-binding domain of a CAR of the present disclosure is an lg NAR, a Fab, a Fab′, a F(ab)′2, a F(ab)′3, an Fv, a single chain variable fragment (scFv), a bis-scFv, a (scFv)2, a minibody, a diabody, a triabody, a tetrabody, an intrabody, a disulfide stabilized Fv protein (dsFv), a unibody, or a nanobody. In some instances, scFvs can be prepared according to method known in the art (see, for example, Bird et al., (1988) Science 242:423-426 and Huston et al., (1988) Proc. Natl. Acad. Sci. USA 85:5879-5883). ScFv molecules can be produced by linking VH and VL regions together using flexible polypeptide linkers. The scFv molecules comprise a linker (e.g., a Ser-Gly linker) with an optimized length and/or amino acid composition. The linker length can greatly affect how the variable regions of a scFv fold and interact. In fact, if a short polypeptide linker is employed (e.g., between 5-10 amino acids) intrachain folding is prevented. Interchain folding is also required to bring the two variable regions together to form a functional epitope binding site. For examples of linker orientation and size see, e.g., Hollinger et al. 1993 Proc Natl Acad. Sci. U.S.A. 90:6444-6448, U.S. Patent Application Publication Nos. 2005/0100543, 2005/0175606, 2007/0014794, and PCT publication Nos. WO2006/020258 and WO2007/024715, is incorporated herein by reference.

[0554] An scFv can comprise a linker of, e.g., at least 1, 2, 3, 4, 5, 6, 7, 8, 9, 10, 11, 12, 13, 14, 15, 16, 17, 18, 19, 20, 25, 30, 35, 40, 45, 50, or more amino acid residues between its VL and VH regions. The linker sequence may comprise any naturally occurring amino acid. In some embodiments, the linker sequence comprises amino acids glycine and serine. In another aspect, the linker sequence comprises sets of glycine and serine repeats such as (Gly₄Ser)n, where n is a positive integer equal to or greater than 1 (SEQ ID NO:81). In some aspects, the linker can be (Gly₄Ser)₄ (SEQ ID NO:82) or (Gly₄Ser)₃ (SEQ ID NO:83), or any gly-ser rich linker disclosed above.

[0555] In some aspects, the linker can be GSTSGSGKPGSGEGSTKG (SEQ ID NO:4885), e.g., in an anti-CD19 scFv such as a FMC63-based scFv. In other aspects, the linker can be GSTSGSGKPGSGEGS (SEQ ID NO:4886), e.g., in an anti-Her2 based.

[0556] Variation in the linker length may retain or enhance activity, giving rise to superior efficacy in activity studies.

[0557] In some aspects, the amino acid sequence of the antigen-binding domain or other portions or the entire CAR can be modified, e.g., an amino acid sequence described herein can be modified, e.g., by a conservative substitution. Families of amino acid residues having similar side chains have been defined in the art, including basic side chains (e.g., lysine, arginine, histidine), acidic side chains (e.g., aspartic acid, glutamic acid), uncharged polar side chains (e.g., glycine, asparagine, glutamine, serine, threonine, tyrosine, cysteine), nonpolar side chains (e.g., alanine, valine, leucine, isoleucine, proline, phenylalanine, methionine, tryptophan), beta-branched side chains (e.g., threonine, valine, isoleucine) and aromatic side chains (e.g., tyrosine, phenylalanine, tryptophan, histidine).

[0558] In some specific aspects, the tumor antigen is the tyrosine-protein kinase transmembrane receptor “ROR1,” also known as neurotrophic tyrosinase kinase, receptor-related 1 (NTRKR1). The human amino acid and nucleic acid sequences can be found in a public database, such as GenBank, UniProt and Swiss-Prot. For example, the amino acid sequences of isoforms 1 and 2 precursors of human ROR1 can be found at Accession Nos. NP_005003.2 and NP_001077061.1, respectively, and the mRNA sequences encoding them can be found at Accession Nos. NM_005012.3 and NM_001083592.1, respectively. As used herein, “ROR1” includes proteins comprising mutations, e.g., point mutations, fragments, insertions, deletions and splice variants of full length wild-type ROR1. In some aspects the antigen-binding portion of the CAR recognizes and binds an antigen within the extracellular domain of the ROR1 protein. In some aspects, the ROR1 protein is expressed on a cancer cell.

[0559] ROR1 is a member of the receptor tyrosine kinase-like orphan receptor (ROR) family. In humans ROR1 is encoded by the ROR1 gene. The protein encoded by this gene is a receptor tyrosine kinase that modulates growth in the central nervous system and has a role in the metastasis of cancer cells. ROR1 is considered a pseudokinase that lacks significant catalytic activity and interacts with the non-canonical Wnt signaling pathway. Increase expression of ROR1 is associate, e.g., with B-cell chronic lymphocytic leukemia. ROR1 is highly expressed in circulating tumor cells and promotes invasion of pancreatic cancer cells (Xu et al., 2018, Mol. Med. Rep. 18:5087-5094). ROR1 also appears to promote tumor progression in endometrial cancer, similar to its role in ovarian cancer (Henry et al, 2018, Gynecol. Oncol. 148:576-584). ROR1 is expressed in epithelial tumors and is homogenously expressed on a subset of ovarian cancer, triple-negative breast cancer, and lung cancer (Balakrishnan et al., 2017, Clin, Cancer Res. 23:3061-3071). ROR1 expression has also been positively associated with lymph-node metastasis in colorectal cancer patients (Zhou et al., 2017, Oncotarget 8:32864-32872).

[0560] In some aspects, anti-ROR1 inhibitors, e.g., CARs of present disclosure or cells expressing those CARs, can be used to treat B-cell malignancies (e.g., leukemias, such as CLL, and B-cell lymphomas, such as mantle cell lymphoma; ALL; small lymphocytic lymphoma; marginal cell B-Cell lymphoma; and Burkett's Lymphoma) or epithelial cancers (e.g., breast cancer, renal cell carcinoma, lung cancer, colorectal cancers, ovarian cancer, and melanoma).

[0561] An exemplary anti-ROR1 CAR is described in Hudecek, et al. Clin. Cancer Res. 19.12(2013):3153-64, incorporated herein by reference. In some aspects, a CAR of the present disclosure comprises the anti-ROR1 CART described in Hudecek et al. (for example, generated as described in Hudecek et al. at page 3155, first full paragraph, incorporated herein by reference), wherein the spacer disclosed in Hudecek has been replaced by a CAR spacer of the present disclosure. In other aspects, an anti-ROR1 CAR of the present disclosure includes an antibody or fragment thereof comprising the VH and/or VL sequences of the 2A2, R11, and R12 anti-ROR1 monoclonal antibodies described in Hudecek et al. at paragraph bridging pages 3154-55; Baskar et al. MAbs 4(2012):349-61; and Yang et al. PLoS ONE 6(2011):e21018, incorporated herein by reference.

[0562] In some aspects, an antigen-binding domain of the present disclosure is capable of cross-competing with an anti-ROR1 antibody, e.g., R11, R12, or 2A2 antibodies. The R11, R12, and 2A2 antibody sequences are shown in TABLE 19. In some aspects, the antigen-binding domain useful for the present disclosure binds to the same epitope of the R11 antibody, the R12 antibody, or the 2A2 antibody.

TABLE 19
R11, R12 and 2A2 antibody CDRs

| | | |
|---|---|---|
| R11 VH | R12 VH | 2A2 VH |
| (SEQ ID NO: 4887) | (SEQ ID NO: 4895) | (SEQ ID NO: 4903) |
| R11 VH CDR1 | R12 VH CDR1 | 2A2 VH CDR1 |
| (SEQ ID NO: 4888) | (SEQ ID NO: 4896) | (SEQ ID NO: 4904) |
| R11 VH CDR2 | R12 VH CDR2 | 2A2 VH CDR2 |
| (SEQ ID NO: 4889) | (SEQ ID NO: 4897) | (SEQ ID NO: 4905) |
| R11 VH CDR3 | R12 VH CDR3 | 2A2 VH CDR3 |
| (SEQ ID NO: 4890) | (SEQ ID NO: 4898) | (SEQ ID NO: 4906) |
| R11 VL | R12 VL | 2A2 VL |
| (SEQ ID NO: 4891) | (SEQ ID NO: 4899) | (SEQ ID NO: 4907) |
| R11 VL CDR1 | R12 VL CDR1 | 2A2 VL CDR1 |
| (SEQ ID NO: 4892) | (SEQ ID NO: 4900) | (SEQ ID NO: 4908) |
| R11 VL CDR2 | R12 VL CDR2 | 2A2 VL CDR2 |
| (SEQ ID NO: 4893) | (SEQ ID NO: 4901) | (SEQ ID NO: 4909) |
| R11 VL CDR3 | R12 VL CDR3 | 2A2 VL CDR3 |
| (SEQ ID NO: 4894) | (SEQ ID NO: 4902) | (SEQ ID NO: 4910) |

[0563] In some aspects, the antigen-binding domain of the present disclosure comprises VH CDR3 of the R11 antibody. In some aspects, the antigen-binding domain of the present disclosure comprises VH CDR1, VH CDR2 and VH CDR3 of the R11 antibody. In some aspects, the antigen-binding domain of the present disclosure comprises VH CDR1, VH CDR2, VH CDR3, VL CDR1, VL CDR2, and VL CDR3 of the R11 antibody. In some aspects, the antigen-binding domain of the present disclosure, e.g., R11 scFv, comprises the VH and the VL of the R11 antibody. In some aspects, the R11 scFv is linked to a transmembrane domain by an IgG2 linker, e.g., Spacer 1 (SEQ ID NO: 4830), and optionally a linker of SEQ ID NO: 4818 or 5088. In some aspects, the R11 scFv is linked to a transmembrane domain by an IgG1 linker, e.g., Spacer 11 (SEQ ID NO: 4840), and optionally a linker of SEQ ID NO: 4818 or 5088. In some aspects, the R11 scFv is linked to a transmembrane domain by an IgG3 linker, e.g., Spacer 13 (SEQ ID NO: 4841), and optionally a linker of SEQ ID NO: 4818. In some aspects, the R11 scFv is linked to a transmembrane domain by an IgG2 linker, e.g., Spacer 14 (SEQ ID NO: 4842), and optionally a linker of SEQ ID NO: 4818 or 5088.

[0564] In some aspects, the R11 scFv is linked to a transmembrane domain by an IgG3 linker, e.g., Spacer 4 (SEQ ID NO: 4833), and optionally a linker of SEQ ID NO: 4818 or 5088. In some aspects, the R11 scFv is linked to a transmembrane domain by an IgG3 linker, e.g., Spacer 5 (SEQ ID NO: 4834), and optionally a linker of SEQ ID NO: 4818 or 5088. In some aspects, the R11 scFv is linked to a transmembrane domain by an IgG3 linker, e.g., Spacer 6 (SEQ ID NO: 4835), and optionally a linker of SEQ ID NO: 4818 or 5088.

[0565] In some aspects, the antigen-binding domain of the present disclosure comprises VH CDR3 of the R12 antibody. In some aspects, the antigen-binding domain of the present disclosure comprises VH CDR1, VH CDR2 and VH CDR3 of the R12 antibody. In some aspects, the antigen-binding domain of the present disclosure comprises VH CDR1, VH CDR2, VH CDR3, VL CDR1, VL CDR2, and VL CDR3 of the R12 antibody. In some aspects, the antigen-binding domain of the present disclosure, e.g., R12 scFv, comprises the VH and the VL of the R12 antibody. In some aspects, the R12 scFv is linked to a transmembrane domain by an IgG2 linker, e.g., Spacer 1 (SEQ ID NO: 4830), and optionally a linker of SEQ ID NO: 4818 or 5088. In some aspects, the R12 scFv is linked to a transmembrane domain by an IgG1 linker, e.g., Spacer 11 (SEQ ID NO: 4840), and optionally a linker of SEQ ID NO: 4818 or 5088. In some aspects, the R12 scFv is linked to a transmembrane domain by an IgG3 linker, e.g., Spacer 13 (SEQ ID NO: 4841), and optionally a linker of SEQ ID NO: 4818 or 5088. In some aspects, the R12 scFv is linked to a transmembrane domain by an IgG2 linker, e.g., Spacer 14 (SEQ ID NO: 4842), and optionally a linker of SEQ ID NO: 4818 or 5088.

[0566] In some aspects, the antigen-binding domain of the present disclosure comprises VH CDR3 of the 2A2 antibody. In some aspects, the antigen-binding domain of the present disclosure comprises VH CDR1, VH CDR2 and VH CDR3 of the 2A2 antibody. In some aspects, the antigen-binding domain of the present disclosure comprises VH CDR1, VH CDR2, VH CDR3, VL CDR1, VL CDR2, and VL CDR3 of the 2A2 antibody. In some aspects, the antigen-binding domain of the present disclosure, e.g., 2A2 scFv, comprises the VH and the VL of the 2A2 antibody. In some aspects, the 2A2 scFv is linked to a transmembrane domain by an IgG2 linker, e.g., Spacer 1 (SEQ ID NO: 4830), and optionally a linker of SEQ ID NO: 4818 or 5088. In some aspects, the 2A2 scFv is linked to a transmembrane domain by an IgG1 linker, e.g., Spacer 11 (SEQ ID NO: 4840), and optionally a linker of SEQ ID NO: 4818 or 5088. In some aspects, the 2A2 scFv is linked to a transmembrane domain by an IgG3 linker, e.g., Spacer 13 (SEQ ID NO: 4841), and optionally a linker of SEQ ID NO: 4818. In some aspects, the 2A2 scFv is linked to a transmembrane domain by an IgG2 linker, e.g., Spacer 14 (SEQ ID NO: 4842), and optionally a linker of SEQ ID NO: 4818 or 5088.

[0567] In some aspects, the 2A2 scFv is linked to a transmembrane domain by an IgG3 linker, e.g., Spacer 9 (SEQ ID NO: 4838), and optionally a linker of SEQ ID NO: 4818 or 5088. In some aspects, the 2A2 scFv is linked to a transmembrane domain by an IgG3 linker, e.g., Spacer 10 (SEQ ID NO: 4839), and optionally a linker of SEQ ID NO: 4818 or 5088.

[0568] In other aspects, a CAR of the present disclosure targeting ROR1 includes an antibody or fragment thereof (e.g., single chain variable fragment (scFv)) that targets ROR1, including those described in U.S. Patent Nos. U.S. Pat. No. 9,316,646B2, issued Sep. 12, 2017, or U.S. Pat. No. 9,758,586B2, issued Apr. 19, 2016, incorporated herein by reference.

[0569] In some aspects, a CAR of the present disclosure comprises an antigen-binding domain, a transmembrane domain, and an intracellular domain, wherein the antigen-binding domain and the transmembrane domain are linked by a CAR spacer of the present disclosure, wherein the spacer comprises the sequence set forth in SEQ ID NO: 4830, and optionally a linker of SEQ ID NO: 4818 or 5088, and wherein the antigen-binding domain comprises VH CDR1, VH CDR2, VH CDR3, VL CDR1, VL CDR2, and VL CDR3 of the R11 antibody, e.g., VH and VL of the R11 antibody. In some aspects, the spacer comprises the sequence set forth in SEQ ID NO: 4840, SEQ ID NO: 4841, or SEQ ID NO: 4842, and optionally a linker of SEQ ID NO: 4818 or 5088. In some aspects, the combined length of the optional linker of SEQ ID NO:4818 or 5088 and the spacer is between about 180 Å and about 250 Å. In some aspects, the combined length of the optional linker of SEQ ID NO:4818 or 5088 and the spacer is about 200 Å. In some aspects, the combined length of the optional linker of SEQ ID NO:4818 or 5088 and the spacer is about 180 Å, about 190 Å, about 200 Å, about 210 Å, about 210 Å, about 230 Å, about 240 Å, or about 250 Å.

[0570] In some aspects, a CAR of the present disclosure comprises an antigen-binding domain, a transmembrane domain, and an intracellular domain, wherein the antigen-binding domain and the transmembrane domain are linked by a CAR spacer of the present disclosure, wherein the spacer comprises the sequence set forth in SEQ ID NO: 4830, and optionally a linker of SEQ ID NO: 4818 or 5088, and wherein the antigen-binding domain comprises VH CDR1, VH CDR2, VH CDR3, VL CDR1, VL CDR2, and VL CDR3 of the R12 antibody, e.g., VH and VL of the R12 antibody. In some aspects, the spacer comprises a sequence set forth in SEQ ID NO: 4840, SEQ ID NO: 4841, or SEQ ID NO: 4842, and optionally a linker of SEQ ID NO: 4818 or 5088. In some aspects, the combined length of the optional linker of SEQ ID NO:4818 or 5088 and the spacer is between about 35 Å and about 55 Å. In some aspects, the combined length of the optional linker of SEQ ID NO:4818 or 5088 and the spacer is about 45 Å. In some aspects, the combined length of the optional linker of SEQ ID NO:4818 or 5088 and the spacer is about 35 Å, about 40 Å, about 45 Å, about 50 Å, or about 55 Å.

[0571] In some aspects, a CAR of the present disclosure comprises an antigen-binding domain, a transmembrane domain, and an intracellular domain, wherein the antigen-binding domain and the transmembrane domain are linked by a CAR spacer of the present disclosure, wherein the spacer comprises the sequence set forth in SEQ ID NO: 4830, and optionally a linker of SEQ ID NO: 4818 or 5088, and wherein the antigen-binding domain comprises VH CDR1, VH CDR2, VH CDR3, VL CDR1, VL CDR2, and VL CDR3 of the 2A2 antibody, e.g., VH and VL of the 2A2 antibody. In some aspects, the spacer comprises the sequence set forth in SEQ ID NO: 4840, SEQ ID NO: 4841, or SEQ ID NO: 4842, and optionally a linker of SEQ ID NO: 4818 or 5088. In some aspects, the combined length of the optional linker of SEQ ID NO:4818 or 5088 and the spacer is between about 35 Å and about 55 Å. In some aspects, the combined length of the optional linker of SEQ ID NO:4818 or 5088 and the spacer is about 45 Å. In some aspects, the combined length of the optional linker of SEQ ID NO:4818 or 5088 and the spacer is about 35 Å, about 40 Å, about 45 Å, about 50 Å, or about 55 Å.

[0572] In some aspects, anti-ROR1 antigen-binding antibody fragments (e.g., scFvs) are conjugated or fused to a biologically active molecule, e.g., to form a CAR of the present disclosure (i.e., a CAR comprising a CAR spacer of the present disclosure, i.e., a hinge derived CAR spacer, a loop derived CAR spacer, or a combination thereof) that directs immune cells, e.g., T cells to respond to ROR1-expressing cells.

[0573] In some aspects, a CAR of the present disclosure (i.e., a CAR comprising a CAR spacer of the present disclosure, i.e., a hinge derived CAR spacer, a loop derived CAR spacer, or a combination thereof) inhibiting ROR1 includes an anti-ROR1 monoclonal antibody called UC-961 (Cirmtuzumab) o an antigen-binding portion thereof. See, e.g., Clinical Trial Identifier No. NCT02222688. Cirmtuzumab can be used to treat cancers, such as chronic lymphocytic leukemia (CLL), ovarian cancer, and melanoma. See, e.g., Hojjat-Farsangi et al. PLoS One. 8(4): e61167; and NCT02222688.

[0574] In some aspects, a CAR of the present disclosure (i.e., a CAR comprising a CAR spacer of the present disclosure, i.e., a hinge derived CAR spacer, a loop derived CAR spacer, or a combination thereof) inhibiting CD19 includes an anti-CD19 antibody or antigen-binding portion thereof.

[0575] In some aspects, a CAR of the present disclosure (i.e., a CAR comprising a CAR spacer of the present disclosure, i.e., a hinge derived CAR spacer, a loop derived CAR spacer, or a combination thereof) inhibiting Her2 includes an anti-Her2 antibody or antigen-binding portion thereof.

### Signaling, Transmembrane, Costimulatory Domains

[0576] In some aspects, the intracellular domain of a CAR of the present disclosure (i.e., CAR comprising a CAR spacer of the present disclosure, i.e., a hinge derived CAR spacer, a loop derived CAR spacer, or a combination thereof) is a signaling domain derived from CD3zeta, FcR gamma, FcR beta, CD3 gamma, CD3 delta, CD3 epsilon, CD5, CD22, CD79a, CD79b, and CD66d. In some aspect, the CAR further comprises a co-stimulatory domain derived from 2B4, HVEM, ICOS, LAG3, DAP10, DAP12, CD27, CD28, 4-1BB (CD137), OX40 (CD134), CD30, CD40, ICOS (CD278), glucocorticoid-induced tumor necrosis factor receptor (GITR), lymphocyte function-associated antigen-1 (LFA-1), CD2, CD7, LIGHT, NKG2C, or B7-H3. In some aspects, the CAR further comprises a 4-11BBn costimulatory domain. In some aspects, the 4-1BB costimulatory domain comprises SEQ ID NO: 4869.

[0577] In some aspects, the CAR of the present disclosure (i.e., CAR comprising a CAR spacer of the present disclosure, i.e., a hinge derived CAR spacer, a loop derived CAR spacer, or a combination thereof) comprises a transmembrane domain of a protein selected from the group consisting of the alpha, beta or zeta chain of the T-cell receptor, CD28, CD3 epsilon, CD45, CD4, CD5, CD8, CD9, CD16, CD22, CD33, CD37, CD64, CD80, CD86, CD134, CD137 and CD154. The transmembrane domain may be derived either from a natural or from a recombinant source. Where the source is natural, the domain may be derived from any membrane-bound or transmembrane protein. In some aspects, the transmembrane domain is capable of signaling to the intracellular domain(s) whenever the CAR of the present disclosure has bound to a target.

[0578] In some aspects, a transmembrane domain can include at least the transmembrane region(s) of, e.g., KIRDS2, OX40, CD2, CD27, LFA-1 (CD11a, CD18), ICOS (CD278), 4-1BB (CD137), GITR, CD40, BAFFR, HVEM (LIGHTR), SLAMF7, NKp80 (KLRF1), NKp44, NKp30, NKp46, CD160, CD19, IL2R beta, IL2R gamma, IL7R α, ITGA1, VLA1, CD49a, ITGA4, IA4, CD49D, ITGA6, VLA-6, CD49f, ITGAD, CD11d, ITGAE, CD103, ITGAL, CD11a, LFA-1, ITGAM, CD11b, ITGAX, CD11c, ITGB1, CD29, ITGB2, CD18, LFA-1, ITGB7, TNFR2, DNAM1 (CD226), SLAMF4 (CD244, 2B4), CD84, CD96 (Tactile), CEACAM1, CRTAM, Ly9 (CD229), CD160 (BY55), PSGL1, CD100 (SEMA4D), SLAMF6 (NTB-A, Ly108), SLAM (SLAMF1, CD150, IPO-3), BLAME (SLAMF8), SELPLG (CD162), LTBR, PAG/Cbp, NKG2D, NKG2C, or CD19.

[0579] In some aspects, the CAR of the present disclosure (i.e., CAR comprising a CAR spacer of the present disclosure, i.e., a hinge derived CAR spacer, a loop derived CAR spacer, or a combination thereof) further comprises a sequence encoding a costimulatory domain, e.g., a costimulatory domain described herein. In some aspects, the costimulatory domain comprises a functional signaling domain of a protein selected from the group consisting of OX40, CD2, CD27, CD28, CDS, ICAM-1, LFA-1 (CD11a/CD18), ICOS (CD278), and 4-1BB (CD137). In some aspects, the costimulatory domain comprises a functional signaling domain of a protein selected from the group consisting of MHC class I molecule, TNF receptor proteins, Immunoglobulin-like proteins, cytokine receptors, integrins, signaling lymphocytic activation molecules (SLAM proteins), activating NK cell receptors, BTLA, a Toll ligand receptor, OX40, CD2, CD7, CD27, CD28, CD30, CD40, CDS, ICAM-1, LFA-1 (CD11a/CD18), 4-1BB (CD137), B7-H3, CDS, ICAM-1, ICOS (CD278), GITR, BAFFR, LIGHT, HVEM (LIGHTR), KIRDS2, SLAMF7, NKp80 (KLRF1), NKp44, NKp30, NKp46, CD19, CD4, CD8alpha, CD8beta, IL2R beta, IL2R gamma, IL7R alpha, ITGA4, VLA1, CD49a, ITGA4, IA4, CD49D, ITGA6, VLA-6, CD49f, ITGAD, CD11d, ITGAE, CD103, ITGAL, CD11a, LFA-1, ITGAM, CD11b, ITGAX, CD11c, ITGB1, CD29, ITGB2, CD18, LFA-1, ITGB7, NKG2D, NKG2C, TNFR2, TRANCE/RANKL, DNAM1 (CD226), SLAMF4 (CD244, 2B4), CD84, CD96 (Tactile), CEACAM1, CRTAM, Ly9 (CD229), CD160 (BY55), PSGL1, CD100 (SEMA4D), CD69, SLAMF6 (NTB-A, Ly108), SLAM (SLAMF1, CD150, IPO-3), BLAME (SLAMF8), SELPLG (CD162), LTBR, LAT, GADS, SLP-76, PAG/Cbp, CD19a, and a ligand that specifically binds with CD83. In some aspects, the costimulatory domain comprises 4-1BB, CD27, CD28, or ICOS.

[0580] In some aspects, the CAR of the present disclosure (i.e., CAR comprising a CAR spacer of the present disclosure, i.e., a hinge derived CAR spacer, a loop derived CAR spacer, or a combination thereof) further comprises a sequence encoding an intracellular signaling domain, e.g., an intracellular signaling domain described herein. In some aspects, the intracellular signaling domain comprises a functional signaling domain of 4-1BB and/or a functional signaling domain of CD3 zeta. In some aspects, the intracellular signaling domain comprises a functional signaling domain of CD27 and/or a functional signaling domain of CD3 zeta.

[0581] In some aspects, the CAR of the present disclosure (i.e., CAR comprising a CAR spacer of the present disclosure, i.e., a hinge derived CAR spacer, a loop derived CAR spacer, or a combination thereof) further comprises a leader sequence. In some aspects, the intracellular signaling domain comprises CD3z comprising SEQ ID NO: 4870.

[0582] In some aspects, the CAR of the present disclosure (i.e., CAR comprising a CAR spacer of the present disclosure, i.e., a hinge derived CAR spacer, a loop derived CAR spacer, or a combination thereof) comprises an optional leader sequence (e.g., an optional leader sequence described herein), an extracellular antigen-binding domain, a CAR spacer of the present disclosure, a transmembrane domain (e.g., transmembrane domain described herein), and an intracellular stimulatory domain (e.g., intracellular stimulatory domain described herein).

[0583] In some aspects, an exemplary CAR construct of the present disclosure comprises an optional leader sequence (e.g., a leader sequence described herein), an extracellular antigen-binding domain, a hinge, a transmembrane domain, an intracellular costimulatory domain (e.g., an intracellular costimulatory domain described herein) and an intracellular stimulatory domain.

[0584] In some aspects, the transmembrane domain of a CAR of the present disclosure (e.g., a CAR targeting ROR1, CD19 or Her 2) comprises a transmembrane domain is which linked to the intracellular domain of the CAR by a linker.

[0585] In some aspects, the present disclosure provides a CAR comprising: (i) an R12 scFv comprising SEQ ID NO: 4875; (ii) a Gly-Ser linker of SEQ ID NO:4818 or 5088, (iii) Spacer 1 comprising or consisting of SEQ ID NO:4830, (iv) a transmembrane domain comprising SEQ ID NO: 4868 and optionally (v) a 4-1BB costimulatory domain comprising SEQ ID NO: 4869. In some aspects, the CAR further comprises (vi) CD3z comprising SEQ ID NO: 4870; (vii) P2A comprising SEQ ID NO: 4871; (viii) EGFRt comprising SEQ ID NO: 4872 or any combination thereof.

[0586] In some aspects, the present disclosure provides a CAR comprising: (i) an R12 scFv comprising SEQ ID NO: 4875; (ii) a Gly-Ser linker of SEQ ID NO:4818 or 5088, (iii) Spacer 15 comprising or consisting of SEQ ID NO:4843, (iv) a transmembrane domain comprising SEQ ID NO: 4868 and optionally (v) a 4-1BB costimulatory domain comprising SEQ ID NO: 4869. In some aspects, the CAR further comprises (vi) CD3z comprising SEQ ID NO: 4870; (vii) P2A comprising SEQ ID NO: 4871; (viii) EGFRt comprising SEQ ID NO: 4872, or any combination thereof.

[0587] In some aspects, the present disclosure provides a CAR comprising: (i) an R12 scFv comprising SEQ ID NO: 4875; (ii) a Gly-Ser linker of SEQ ID NO:4818 or 5088, (iii) Spacer 21 comprising or consisting of SEQ ID NO:4849, (iv) a transmembrane domain comprising SEQ ID NO: 4868 and optionally (v) a 4-1BB costimulatory domain comprising SEQ ID NO: 4869. In some aspects, the CAR further comprises (vi) CD3z comprising SEQ ID NO: 4870; (vii) P2A comprising SEQ ID NO: 4871; (viii) EGFRt comprising SEQ ID NO: 4872, or any combination thereof.

[0588] In some aspects, the present disclosure provides a CAR comprising: (i) an R11 scFv comprising SEQ ID NO: 5048; (ii) a Gly-Ser linker of SEQ ID NO:4818 or 5088, (iii) Spacer 4 comprising or consisting of SEQ ID NO:4833, (iv) a transmembrane domain comprising SEQ ID NO: 4868 and optionally (v) a 4-1BB costimulatory domain comprising SEQ ID NO: 4869. In some aspects, the CAR further comprises (vi) CD3z comprising SEQ ID NO: 4870; (vii) P2A comprising SEQ ID NO: 4871; (viii) EGFRt comprising SEQ ID NO: 4872, or any combination thereof.

[0589] In some aspects, the present disclosure comprises provides a CAR comprising: (i) an R11 scFv comprising SEQ ID NO: 5048; (ii) a Gly-Ser linker of SEQ ID NO:4818 or 5088, (iii) Spacer 5 comprising or consisting of SEQ ID NO:4834, (iv) a transmembrane domain comprising SEQ ID NO: 4868 and optionally (v) a 4-1BB costimulatory domain comprising SEQ ID NO: 4869. In some aspects, the CAR further comprises (vi) CD3z comprising SEQ ID NO: 4870; (vii) P2A comprising SEQ ID NO: 4871; (viii) EGFRt comprising SEQ ID NO: 4872, or any combination thereof.

[0590] In some aspects, the present disclosure provides a CAR comprising: (i) an R11 scFv comprising SEQ ID NO: 5048; (ii) a Gly-Ser linker of SEQ ID NO:4818 or 5088, (iii) Spacer 6 comprising or consisting of SEQ ID NO:4835, (iv) a transmembrane domain comprising SEQ ID NO: 4868 and optionally (v) a 4-1BB costimulatory domain comprising SEQ ID NO: 4869. In some aspects, the CAR further comprises (vi) CD3z comprising SEQ ID NO: 4870; (vii) P2A comprising SEQ ID NO: 4871; (viii) EGFRt comprising SEQ ID NO: 4872, or any combination thereof.

[0591] In some aspects, the present disclosure provides a CAR comprising: (i) a 2A2 scFv comprising SEQ ID NO: 5047; (ii) a Gly-Ser linker of SEQ ID NO:4818 or 5088, (iii) Spacer 13 comprising or consisting of SEQ ID NO:4841, (iv) a transmembrane domain comprising SEQ ID NO: 4868 and optionally (v) a 4-1BB costimulatory domain comprising SEQ ID NO: 4869. In some aspects, the CAR further comprises (vi) CD3z comprising SEQ ID NO: 4870; (vii) P2A comprising SEQ ID NO: 4871; (viii) EGFRt comprising SEQ ID NO: 4872, or any combination thereof.

[0592] In some aspects, the present disclosure provides a CAR comprising: (i) a 2A2 scFv comprising SEQ ID NO: 5047; (ii) a Gly-Ser linker of SEQ ID NO:4818 or 5088, (iii) Spacer 21 comprising or consisting of SEQ ID NO:4889, (iv) a transmembrane domain comprising SEQ ID NO: 4868 and optionally (v) a 4-1BB costimulatory domain comprising SEQ ID NO: 4869. In some aspects, the CAR further comprises (vi) CD3z comprising SEQ ID NO: 4870; (vii) P2A comprising SEQ ID NO: 4871; (viii) EGFRt comprising SEQ ID NO: 4872, or any combination thereof.

[0593] In some aspects, the present disclosure provides a CAR comprising: (i) a 2A2 scFv comprising SEQ ID NO: 5047; (ii) a Gly-Ser linker of SEQ ID NO:4818 or 5088, (iii) Spacer 28 comprising or consisting of SEQ ID NO:4856, (iv) a transmembrane domain comprising SEQ ID NO: 4868 and optionally (v) a 4-1BB costimulatory domain comprising SEQ ID NO: 4869. In some aspects, the CAR further comprises (vi) CD3z comprising SEQ ID NO: 4870; (vii) P2A comprising SEQ ID NO: 4871; (viii) EGFRt comprising SEQ ID NO: 4872, or any combination thereof.

[0594] In some aspects, the present disclosure provides a CAR comprising: (i) an R12 scFv comprising SEQ ID NO: 4875; (ii) a Gly-Ser linker of SEQ ID NO:4818 or 5088, (iii) a spacer derived from a human immunoglobulin hinge and/or constant region or a functional fragment thereof, (iv) a transmembrane domain comprising SEQ ID NO: 4868 and optionally (v) a 4-1BB costimulatory domain comprising SEQ ID NO: 4869, wherein the combined length of the linker (ii) and spacer (iii) is between 35 Å and 55 Å. In some aspects, the CAR further comprises (vi) CD3z comprising SEQ ID NO: 4870; (vii) P2A comprising SEQ ID NO: 4871; (viii) EGFRt comprising SEQ ID NO: 4872, or any combination thereof.

[0595] In some aspects, the present disclosure provides a CAR comprising: (i) an R12 scFv comprising SEQ ID NO: 4875; (ii) a Gly-Ser linker of SEQ ID NO:4818 or 5088, (iii) a spacer derived from a human immunoglobulin hinge and/or constant region or a functional fragment thereof, (iv) a transmembrane domain comprising SEQ ID NO: 4868 and optionally (v) a 4-1BB costimulatory domain comprising SEQ ID NO: 4869, wherein the combined length of the linker (ii) and spacer (iii) is about 45 Å. In some aspects, the CAR further comprises (vi) CD3z comprising SEQ ID NO: 4870; (vii) P2A comprising SEQ ID NO: 4871; (viii) EGFRt comprising SEQ ID NO: 4872, or any combination thereof.

[0596] In some aspects, the present disclosure provides a CAR comprising: (i) an R11 scFv comprising SEQ ID NO: 5048; (ii) a Gly-Ser linker of SEQ ID NO:4818 or 5088, (iii) a spacer derived from a human immunoglobulin hinge and/or constant region or a functional fragment thereof, (iv) a transmembrane domain comprising SEQ ID NO: 4868 and optionally (v) a 4-1BB costimulatory domain comprising SEQ ID NO: 4869, wherein the combined length of the linker (ii) and spacer (iii) is between 180 Å and 250 Å. In some aspects, the CAR further comprises (vi) CD3z comprising SEQ ID NO: 4870; (vii) P2A comprising SEQ ID NO: 4871; (viii) EGFRt comprising SEQ ID NO: 4872, or any combination thereof.

[0597] In some aspects, the present disclosure provides a CAR comprising: (i) an R11 scFv comprising SEQ ID NO: 5048; (ii) a Gly-Ser linker of SEQ ID NO:4818 or 5088, (iii) a spacer derived from a human immunoglobulin hinge and/or constant region or a functional fragment thereof, (iv) a transmembrane domain comprising SEQ ID NO: 4868 and optionally (v) a 4-1BB costimulatory domain comprising SEQ ID NO: 4869, wherein the combined length of the linker (ii) and spacer (iii) is about 200 Å. In some aspects, the CAR further comprises (vi) CD3z comprising SEQ ID NO: 4870; (vii) P2A comprising SEQ ID NO: 4871; (viii) EGFRt comprising SEQ ID NO: 4872, or any combination thereof.

[0598] In some aspects, the present disclosure provides a CAR comprising: (i) a 2A2 scFv comprising SEQ ID NO: 5047; (ii) a Gly-Ser linker of SEQ ID NO:4818 or 5088, (iii) a spacer derived from a human immunoglobulin hinge and/or constant region or a functional fragment thereof, (iv) a transmembrane domain comprising SEQ ID NO: 4868 and optionally (v) a 4-1BB costimulatory domain comprising SEQ ID NO: 4869, wherein the combined length of the linker (ii) and spacer (iii) is between 35 Å and 55 Å. In some aspects, the CAR further comprises (vi) CD3z comprising SEQ ID NO: 4870; (vii) P2A comprising SEQ ID NO: 4871; (viii) EGFRt comprising SEQ ID NO: 4872, or any combination thereof.

[0599] In some aspects, the present disclosure provides a CAR comprising: (i) a 2A2 scFv comprising SEQ ID NO: 5047; (ii) a Gly-Ser linker of SEQ ID NO:4818 or 5088, (iii) a spacer derived from a human immunoglobulin hinge and/or constant region or a functional fragment thereof, (iv) a transmembrane domain comprising SEQ ID NO: 4868 and optionally (v) a 4-1BB costimulatory domain comprising SEQ ID NO: 4869, wherein the combined length of the linker (ii) and spacer (iii) is about 45 Å. In some aspects, the CAR further comprises (vi) CD3z comprising SEQ ID NO: 4870; (vii) P2A comprising SEQ ID NO: 4871; (viii) EGFRt comprising SEQ ID NO: 4872, or any combination thereof.

[0600] In some aspects, the present disclosure provides a CAR comprising, consisting, or consisting essentially of a sequence set forth in SEQ ID NOS: 5049 to 5063.

[0601] In some aspects, the present disclosure provides a polynucleotide sequence encoding a CAR comprising: (i) an R12 scFv comprising SEQ ID NO: 4875; (ii) a Gly-Ser linker of SEQ ID NO:4818 or 5088, (iii) Spacer 1 comprising or consisting of SEQ ID NO:4830, (iv) a transmembrane domain comprising SEQ ID NO: 4868 and optionally (v) a 4-1BB costimulatory domain comprising SEQ ID NO: 4869. In some aspects, the CAR further comprises (vi) CD3z comprising SEQ ID NO: 4870; (vii) P2A comprising SEQ ID NO: 4871; (viii) EGFRt comprising SEQ ID NO: 4872, or any combination thereof.

[0602] In some aspects, the present disclosure provides a polynucleotide sequence encoding a CAR comprising: (i) an R12 scFv comprising SEQ ID NO: 4875; (ii) a Gly-Ser linker of SEQ ID NO:4818 or 5088, (iii) Spacer 15 comprising or consisting of SEQ ID NO:4843, (iv) a transmembrane domain comprising SEQ ID NO: 4868 and optionally (v) a 4-1BB costimulatory domain comprising SEQ ID NO: 4869. In some aspects, the CAR further comprises (vi) CD3z comprising SEQ ID NO: 4870; (vii) P2A comprising SEQ ID NO: 4871; (viii) EGFRt comprising SEQ ID NO: 4872, or any combination thereof.

[0603] In some aspects, the present disclosure provides a polynucleotide sequence encoding a CAR comprising: (i) an R12 scFv comprising SEQ ID NO: 4875; (ii) a Gly-Ser linker of SEQ ID NO:4818 or 5088, (iii) Spacer 21 comprising or consisting of SEQ ID NO:4849, (iv) a transmembrane domain comprising SEQ ID NO: 4868 and optionally (v) a 4-1BB costimulatory domain comprising SEQ ID NO: 4869. In some aspects, the CAR further comprises (vi) CD3z comprising SEQ ID NO: 4870; (vii) P2A comprising SEQ ID NO: 4871; (viii) EGFRt comprising SEQ ID NO: 4872, or any combination thereof.

[0604] In some aspects, the present disclosure provides a polynucleotide sequence encoding a CAR comprising: (i) an R11 scFv comprising SEQ ID NO: 5048; (ii) a Gly-Ser linker of SEQ ID NO:4818 or 5088, (iii) Spacer 4 comprising or consisting of SEQ ID NO:4833, (iv) a transmembrane domain comprising SEQ ID NO: 4868 and optionally (v) a 4-1BB costimulatory domain comprising SEQ ID NO: 4869. In some aspects, the CAR further comprises (vi) CD3z comprising SEQ ID NO: 4870; (vii) P2A comprising SEQ ID NO: 4871; (viii) EGFRt comprising SEQ ID NO: 4872, or any combination thereof.

[0605] In some aspects, the present disclosure provides a polynucleotide sequence encoding a CAR comprising: (i) an R11 scFv comprising SEQ ID NO: 5048; (ii) a Gly-Ser linker of SEQ ID NO:4818 or 5088, (iii) Spacer 5 comprising or consisting of SEQ ID NO:4834, (iv) a transmembrane domain comprising SEQ ID NO: 4868 and optionally (v) a 4-1BB costimulatory domain comprising SEQ ID NO: 4869. In some aspects, the CAR further comprises (vi) CD3z comprising SEQ ID NO: 4870; (vii) P2A comprising SEQ ID NO: 4871; (viii) EGFRt comprising SEQ ID NO: 4872, or any combination thereof.

[0606] In some aspects, the present disclosure provides a polynucleotide sequence encoding a CAR comprising: (i) an R11 scFv comprising SEQ ID NO: 5048; (ii) a Gly-Ser linker of SEQ ID NO:4818 or 5088, (iii) Spacer 6 comprising or consisting of SEQ ID NO:4835, (iv) a transmembrane domain comprising SEQ ID NO: 4868 and optionally (v) a 4-1BB costimulatory domain comprising SEQ ID NO: 4869. In some aspects, the CAR further comprises (vi) CD3z comprising SEQ ID NO: 4870; (vii) P2A comprising SEQ ID NO: 4871; (viii) EGFRt comprising SEQ ID NO: 4872, or any combination thereof.

[0607] In some aspects, the present disclosure provides a polynucleotide sequence encoding a CAR comprising: (i) a 2A2 scFv comprising SEQ ID NO: 5047; (ii) a Gly-Ser linker of SEQ ID NO:4818 or 5088, (iii) Spacer 13 comprising or consisting of SEQ ID NO:4841, (iv) a transmembrane domain comprising SEQ ID NO: 4868 and optionally (v) a 4-1BB costimulatory domain comprising SEQ ID NO: 4869. In some aspects, the CAR further comprises (vi) CD3z comprising SEQ ID NO: 4870; (vii) P2A comprising SEQ ID NO: 4871; (viii) EGFRt comprising SEQ ID NO: 4872, or any combination thereof.

[0608] In some aspects, the present disclosure provides a polynucleotide sequence encoding a CAR comprising: (i) a 2A2 scFv comprising SEQ ID NO: 5047; (ii) a Gly-Ser linker of SEQ ID NO:4818 or 5088, (iii) Spacer 21 comprising or consisting of SEQ ID NO:4889, (iv) a transmembrane domain comprising SEQ ID NO: 4868 and optionally (v) a 4-1BB costimulatory domain comprising SEQ ID NO: 4869. In some aspects, the CAR further comprises (vi) CD3z comprising SEQ ID NO: 4870; (vii) P2A comprising SEQ ID NO: 4871; (viii) EGFRt comprising SEQ ID NO: 4872, or any combination thereof.

[0609] In some aspects, the present disclosure provides a polynucleotide sequence encoding a CAR comprising: (i) 2A2 scFv comprising SEQ ID NO: 5047; (ii) a Gly-Ser linker of SEQ ID NO:4818 or 5088, (iii) Spacer 28 comprising or consisting of SEQ ID NO:4856, (iv) a transmembrane domain comprising SEQ ID NO: 4868 and optionally (v) a 4-1BB costimulatory domain comprising SEQ ID NO: 4869. In some aspects, the CAR further comprises (vi) CD3z comprising SEQ ID NO: 4870; (vii) P2A comprising SEQ ID NO: 4871; (viii) EGFRt comprising SEQ ID NO: 4872, or any combination thereof.

[0610] In some aspects, the present disclosure provides a polynucleotide sequence encoding a CAR comprising: (i) an R12 scFv comprising SEQ ID NO: 4875; (ii) a Gly-Ser linker of SEQ ID NO:4818 or 5088, (iii) a spacer derived from a human immunoglobulin hinge and/or constant region or a functional fragment thereof, (iv) a transmembrane domain comprising SEQ ID NO: 4868 and optionally (v) a 4-1BB costimulatory domain comprising SEQ ID NO: 4869, wherein the combined length of the linker (ii) and spacer (iii) is between 35 Å and 55 Å. In some aspects, the CAR comprises (vi) CD3z comprising SEQ ID NO: 4870; (vii) P2A comprising SEQ ID NO: 4871; (viii) EGFRt comprising SEQ ID NO: 4872, or any combination thereof.

[0611] In some aspects, the present disclosure provides a polynucleotide sequence encoding a CAR comprising: (i) an R12 scFv comprising SEQ ID NO: 4875; (ii) a Gly-Ser linker of SEQ ID NO:4818 or 5088, (iii) a spacer derived from a human immunoglobulin hinge and/or constant region or a functional fragment thereof, (iv) a transmembrane domain comprising SEQ ID NO: 4868 and optionally (v) a 4-1BB costimulatory domain comprising SEQ ID NO: 4869, wherein the combined length of the linker (ii) and spacer (iii) is about 45 Å. In some aspects, the CAR further comprises (vi) CD3z comprising SEQ ID NO: 4870; (vii) P2A comprising SEQ ID NO: 4871; (viii) EGFRt comprising SEQ ID NO: 4872, or any combination thereof.

[0612] In some aspects, the present disclosure provides a polynucleotide sequence encoding a CAR comprising: (i) an R11 scFv comprising SEQ ID NO: 5048; (ii) a Gly-Ser linker of SEQ ID NO:4818 or 5088, (iii) a spacer derived from a human immunoglobulin hinge and/or constant region or a functional fragment thereof, (iv) a transmembrane domain comprising SEQ ID NO: 4868 and optionally (v) a 4-1BB costimulatory domain comprising SEQ ID NO: 4869, wherein the combined length of the linker (ii) and spacer (iii) is between 180 Å and 250 Å. In some aspects, the CAR further comprises (vi) CD3z comprising SEQ ID NO: 4870; (vii) P2A comprising SEQ ID NO: 4871; (viii) EGFRt comprising SEQ ID NO: 4872, or any combination thereof.

[0613] In some aspects, the present disclosure provides a polynucleotide sequence encoding a CAR comprising: (i) an R11 scFv comprising SEQ ID NO: 5048; (ii) a Gly-Ser linker of SEQ ID NO:4818 or 5088, (iii) a spacer derived from a human immunoglobulin hinge and/or constant region or a functional fragment thereof, (iv) a transmembrane domain comprising SEQ ID NO: 4868 and optionally (v) a 4-1BB costimulatory domain comprising SEQ ID NO: 4869, wherein the combined length of the linker (ii) and spacer (iii) is about 200 Å. In some aspects, the CAR further comprises (vi) CD3z comprising SEQ ID NO: 4870; (vii) P2A comprising SEQ ID NO: 4871; (viii) EGFRt comprising SEQ ID NO: 4872, or any combination thereof.

[0614] In some aspects, the present disclosure provides a polynucleotide sequence encoding a CAR comprising: (i) 2A2 scFv comprising SEQ ID NO: 5047; (ii) a Gly-Ser linker of SEQ ID NO:4818 or 5088, (iii) a spacer derived from a human immunoglobulin hinge and/or constant region or a functional fragment thereof, (iv) a transmembrane domain comprising SEQ ID NO: 4868 and optionally (v) a 4-1BB costimulatory domain comprising SEQ ID NO: 4869, wherein the combined length of the linker (ii) and spacer (iii) is between 35 Å and 55 Å. In some aspects, the CAR further comprises (vi) CD3z comprising SEQ ID NO: 4870; (vii) P2A comprising SEQ ID NO: 4871; (viii) EGFRt comprising SEQ ID NO: 4872, or any combination thereof.

[0615] In some aspects, the present disclosure provides a polynucleotide sequence encoding a CAR comprising: (i) 2A2 scFv comprising SEQ ID NO: 5047; (ii) a Gly-Ser linker of SEQ ID NO:4818 or 5088, (iii) a spacer derived from a human immunoglobulin hinge and/or constant region or a functional fragment thereof, (iv) a transmembrane domain comprising SEQ ID NO: 4868 and optionally (v) a 4-1BB costimulatory domain comprising SEQ ID NO: 4869, wherein the combined length of the linker (ii) and spacer (iii) is about 45 Å. In some aspects, the CAR further comprises (vi) CD3z comprising SEQ ID NO: 4870; (vii) P2A comprising SEQ ID NO: 4871; (viii) EGFRt comprising SEQ ID NO: 4872, or any combination thereof.

[0616] In some aspects, the present disclosure provides a polynucleotide sequence encoding a CAR comprising, consisting, or consisting essentially of a protein sequence set forth in SEQ ID NOS: 5049 to 5063.

### Bispecific CARs

[0617] In some aspects, the CARs of the present disclosure are bispecific CARs. Accordingly, in some aspects, the polynucleotide encoding a CAR of the present disclosure encodes at least a polypeptide of a bispecific CAR (e.g., a CAR targeting a first antigen and second antigen).

[0618] In some aspects, the antigen-binding domain of a CAR of the present disclosure is a bispecific antibody molecule. A bispecific antibody has specificity for no more than two antigens. A bispecific antibody molecule is characterized by a first immunoglobulin variable domain sequence which has binding specificity for a first epitope and a second immunoglobulin variable domain sequence that has binding specificity for a second epitope. In some aspects, the first and second epitopes are on the same antigen, e.g., the same protein (or subunit of a multimeric protein). In some aspects, the first and second epitopes overlap. In other aspects, the first and second epitopes do not overlap. In some aspects, the first and second epitopes are on different antigens, e.g., different proteins (or different subunits of a multimeric protein).

[0619] In some aspects, a bispecific antibody molecule comprises a heavy chain variable domain sequence and a light chain variable domain sequence which have binding specificity for a first epitope and a heavy chain variable domain sequence and a light chain variable domain sequence which have binding specificity for a second epitope. In some aspects, a bispecific antibody molecule comprises a half antibody having binding specificity for a first epitope and a half antibody having binding specificity for a second epitope. In some aspects, a bispecific antibody molecule comprises a half antibody, or fragment thereof, having binding specificity for a first epitope and a half antibody, or fragment thereof, having binding specificity for a second epitope. In some aspects, a bispecific antibody molecule comprises a scFv, or fragment thereof, have binding specificity for a first epitope and a scFv, or fragment thereof, have binding specificity for a second epitope.

[0620] In certain aspects, the antibody molecule is a multi-specific (e.g., a bispecific or a trispecific) antibody molecule. Protocols for generating bispecific or heterodimeric antibody molecules are known in the art.

[0621] Within each antibody or antigen-binding antibody fragment (e.g., scFv) of a bispecific antibody molecule, the VH can be upstream or downstream of the VL. In some aspects, the upstream antibody or antibody fragment (e.g., scFv) is arranged with its VH (VH₁) upstream of its VL (VL₁) and the downstream antibody or antibody fragment (e.g., scFv) is arranged with its VL (VL₂) upstream of its VH (VH₂), such that the overall bispecific antibody molecule has the arrangement VH₁-VL₁-VL₂-VH₂. In other aspects, the upstream antibody or antibody fragment (e.g., scFv) is arranged with its VL (VL₁) upstream of its VH (VH₁) and the downstream antibody or antibody fragment (e.g., scFv) is arranged with its VH (V12) upstream of its VL (VL₂), such that the overall bispecific antibody molecule has the arrangement VL₁-VH₁-VH₂-VL₂. Optionally, a linker is disposed between the two antibodies or antibody fragments (e.g., scFvs), e.g., between VL₁ and VL₂ if the construct is arranged as VH₁-VL₁-VL₂-VH₂, or between VH₁ and VH₂ if the construct is arranged as VL₁-VH₁-VH₂-VL₂. The linker may be a linker as described herein, e.g., a (Gly₄Ser)n linker, wherein n is 1, 2, 3, 4, 5, or 6, e.g., 4 (SEQ ID NO: 83). In general, the linker between the two scFvs should be long enough to avoid mispairing between the domains of the two scFvs. Optionally, a linker is disposed between the VL and VH of the first scFv. Optionally, a linker is disposed between the VL and VH of the second scFv. In constructs that have multiple linkers, any two or more of the linkers can be the same or different. Accordingly, in some aspects, a bispecific CAR comprises VLs, VHs, and optionally one or more linkers in an arrangement as described herein.

[0622] In some aspects, the antibody molecule is a bispecific antibody molecule having a first epitope located on a first tumor antigen (e.g., ROR1) and a second epitope located on a second antigen, e.g., CD10, CD19, CD20, CD22, CD34, CD123, FLT-3, ROR1, CD79b, CD179b, or CD79a. In some aspects, the bispecific antibody binds to a first epitope, wherein the first epitope is located on CD19, and to a second epitope, wherein the second epitope is located on CD20. In some aspects, the bispecific antibody binds to a first epitope, wherein the first epitope is located on CD19, and to a second epitope, wherein the second epitope is located on CD22. In some aspects, the bispecific antibody binds to a first epitope, wherein the first epitope is located on CD20, and to a second epitope, wherein the second epitope is located on CD22. In certain aspects, the antibody molecule is a bispecific antibody molecule having a first binding specificity for a first B-cell epitope and a second binding specificity for another B-cell antigen. For instance, in some embodiments the bispecific antibody molecule has a first binding specificity for a first B-cell epitope, e.g., for ROR1, and a second binding specificity for one or more of CD10, CD19, CD20, CD22, CD34, CD123, FLT-3, ROR1, CD79b, CD179b, or CD79a B-cell epitopes.

### Inducible CARs

[0623] In some aspects, the expression of a CAR of the present disclosure (i.e., CAR comprising a CAR spacer of the present disclosure, i.e., a hinge derived CAR spacer, a loop derived CAR spacer, or a combination thereof) is regulated by a constitutive promoter, e.g., immediate early cytomegalovirus (CMV) promoter, Elongation Growth Factor-1α (EF-la), simian virus 40 (SV40) early promoter, mouse mammary tumor virus (MMTV), human immunodeficiency virus (HIV) long terminal repeat (LTR) promoter, MoMuLV promoter, an avian leukemia virus promoter, an Epstein-Barr virus immediate early promoter, a Rous sarcoma virus promoter, as well as human gene promoters such as, but not limited to, the actin promoter, the myosin promoter, the hemoglobin promoter, and the creatine kinase promoter. However, the regulation of the expression of a CAR of the present disclosure is not limited to the use of a constitutive promoter.

[0624] Thus, in some aspects, the CAR of the present disclosure encoded by a polynucleotide disclosed herein is an inducible CAR. The term “inducible” refers to the presence of an “inducible promoter,” i.e., a nucleotide sequence which, when operably linked with a polynucleotide which encodes or specifies a gene product, e.g., a CAR of the present disclosure, causes the gene product to be produced in a cell substantially only when an inducer which corresponds to the promoter is present in the cell. The use of an inducible promoter provides a molecular switch capable of turning on expression of the polynucleotide sequence which it is operatively linked when such expression is desired, or turning off the expression when expression is not desired. Examples of inducible promoters include, but are not limited to a metallothionine promoter, a glucocorticoid promoter, a progesterone promoter, and a tetracycline promoter.

[0625] In other aspects, a polynucleotide encoding a CAR of the present disclosure comprises a “tissue-specific” promoter, i.e., a nucleotide sequence which, when operably linked with a polynucleotide which encodes or specifies a gene product, e.g., a CAR of the present disclosure, causes the gene product to be produced in a cell substantially only if the cell is a cell of the tissue type corresponding to the promoter.

### Vectors

[0626] The present disclosure also provides a vector comprising a polynucleotide encoding a CAR of the present disclosure (i.e., CAR comprising a CAR spacer of the present disclosure, i.e., a hinge derived CAR spacer, a loop derived CAR spacer, or a combination thereof) operably linked to a regulatory element. In some aspects, the polynucleotide encoding a CAR of the present disclosure is a DNA molecule, or a RNA molecule.

[0627] In some aspects, the vector is a transfer vector. The term “transfer vector” refers to a composition of matter which comprises an isolated nucleic acid (e.g., a polynucleotide of the present disclosure) and which can be used to deliver the isolated nucleic acid to the interior of a cell. Numerous vectors are known in the art including, but not limited to, linear polynucleotides, polynucleotides associated with ionic or amphiphilic compounds, plasmids, and viruses. Thus, the term “transfer vector” includes an autonomously replicating plasmid or a virus. The term should also be construed to further include non-plasmid and non-viral compounds which facilitate transfer of nucleic acid into cells, such as, for example, a polylysine compound, liposome, and the like. Examples of viral transfer vectors include, but are not limited to, adenoviral vectors, adeno-associated virus vectors, retroviral vectors, lentiviral vectors, and the like.

[0628] In some aspects, the vector is an expression vector. The term “expression vector” refers to a vector comprising a recombinant polynucleotide (e.g., a polypeptide of the present disclosure) comprising expression control sequences operatively linked to a nucleotide sequence to be expressed. An expression vector comprises sufficient cis-acting elements for expression; other elements for expression can be supplied by the host cell or in an in vitro expression system. Expression vectors include all those known in the art, including cosmids, plasmids (e.g., naked or contained in liposomes) and viruses (e.g., lentiviruses, retroviruses, adenoviruses, and adeno-associated viruses) that incorporate the recombinant polynucleotide.

[0629] In some aspects, the vector is a viral vector, a mammalian vector, or bacterial vector. In some aspects, the vector is selected from the group consisting of an adenoviral vector, a lentivirus, a Sendai virus vector, a baculoviral vector, an Epstein Barr viral vector, a papovaviral vector, a vaccinia viral vector, a herpes simplex viral vector, a hybrid vector, and an AAV vector.

[0630] In some aspects, the adenoviral vector is a third generation adenoviral vector. ADEASY™ is by far the most popular method for creating adenoviral vector constructs. The system consists of two types of plasmids: shuttle (or transfer) vectors and adenoviral vectors. The transgene of interest is cloned into the shuttle vector, verified, and linearized with the restriction enzyme PmeI. This construct is then transformed into ADEASIER-1 cells, which are BJ5183 E. coli cells containing PADEASY™. PADEASY™ is a ˜33Kb adenoviral plasmid containing the adenoviral genes necessary for virus production. The shuttle vector and the adenoviral plasmid have matching left and right homology arms which facilitate homologous recombination of the transgene into the adenoviral plasmid. One can also co-transform standard BJ5183 with supercoiled PADEASY™ and the shuttle vector, but this method results in a higher background of non-recombinant adenoviral plasmids. Recombinant adenoviral plasmids are then verified for size and proper restriction digest patterns to determine that the transgene has been inserted into the adenoviral plasmid, and that other patterns of recombination have not occurred. Once verified, the recombinant plasmid is linearized with PacI to create a linear dsDNA construct flanked by ITRs. 293 or 911 cells are transfected with the linearized construct, and virus can be harvested about 7-10 days later. In addition to this method, other methods for creating adenoviral vector constructs known in the art at the time the present application was filed can be used to practice the methods disclosed herein.

[0631] In other aspects, the viral vector is a retroviral vector, e.g., a lentiviral vector (e.g., a third or fourth generation lentiviral vector). The term “lentivirus” refers to a genus of the Retroviridae family. Lentiviruses are unique among the retroviruses in being able to infect non-dividing cells; they can deliver a significant amount of genetic information into the DNA of the host cell, so they are one of the most efficient methods of a gene delivery vector. HIV, SIV, and FIV are all examples of lentiviruses. The term “lentiviral vector” refers to a vector derived from at least a portion of a lentivirus genome, including especially a self-inactivating lentiviral vector as provided in Milone et al., Mol. Ther. 17(8): 1453-1464 (2009). Other examples of lentivirus vectors that may be used in the clinic, include but are not limited to, e.g., the LENTIVECTOR® gene delivery technology from Oxford BioMedica, the LENTIMAX™ vector system from Lentigen and the like. Nonclinical types of lentiviral vectors are also available and would be known to one skilled in the art.

[0632] Lentiviral vectors are usually created in a transient transfection system in which a cell line is transfected with three separate plasmid expression systems. These include the transfer vector plasmid (portions of the HIV provirus), the packaging plasmid or construct, and a plasmid with the heterologous envelop gene (env) of a different virus. The three plasmid components of the vector are put into a packaging cell which is then inserted into the HIV shell. The virus portions of the vector contain insert sequences so that the virus cannot replicate inside the cell system. Current third generation lentiviral vectors encode only three of the nine HIV-1 proteins (Gag, Pol, Rev), which are expressed from separate plasmids to avoid recombination-mediated generation of a replication-competent virus. In fourth generation lentiviral vectors, the retroviral genome has been further reduced (see, e.g., TAKARA® LENTI-X™ fourth-generation packaging systems).

[0633] In some aspects, the present disclosure provides a lentiviral vector comprising a polynucleotide sequence encoding: (i) R12 scFv comprising SEQ ID NO: 4875; (ii) Spacer 1 comprising or consisting of SEQ ID NO: 4830, and optionally a Gly-Ser linker of SEQ ID NO:4818 or 5088; (iii) a transmembrane domain comprising SEQ ID NO: 4868 and optionally (iv) a 4-1BB costimulatory domain comprising SEQ ID NO: 4869. In some aspects, the lentiviral vector further comprises a polynucleotide sequence encoding (v) CD3z comprising SEQ ID NO: 4870; (vi) P2A comprising SEQ ID NO: 4871; (vii) EGFRt comprising SEQ ID NO: 4872, or any combination thereof.

[0634] In some aspects, the present disclosure provides a lentiviral vector comprising a polynucleotide sequence encoding: (i) R12 scFv comprising SEQ ID NO: 4875; (ii) Spacer 11 comprising or consisting of SEQ ID NO: 4840, and optionally a Gly-Ser linker of SEQ ID NO:4818 or 5088; (iii) a transmembrane domain comprising SEQ ID NO: 4868 and optionally (iv) a 4-1BB costimulatory domain comprising SEQ ID NO: 4869. In some aspects, the lentiviral vector further comprises a polynucleotide sequence encoding (v) CD3z comprising SEQ ID NO: 4870; (vi) P2A comprising SEQ ID NO: 4871; (vii) EGFRt comprising SEQ ID NO: 4872, or any combination thereof.

[0635] In some aspects, the present disclosure provides a lentiviral vector comprising a polynucleotide sequence encoding: (i) R12 scFv comprising SEQ ID NO: 4875; (ii) Spacer 13 comprising or consisting of SEQ ID NO: 4841, and optionally a Gly-Ser linker of SEQ ID NO:4818 or 5088; (iii) a transmembrane domain comprising SEQ ID NO: 4868 and optionally (iv) a 4-1BB costimulatory domain comprising SEQ ID NO: 4869. In some aspects, the lentiviral vector further comprises a polynucleotide sequence encoding (v) CD3z comprising SEQ ID NO: 4870; (vi) P2A comprising SEQ ID NO: 4871; (vii) EGFRt comprising SEQ ID NO: 4872, or any combination thereof.

[0636] In some aspects, the present disclosure provides a lentiviral vector comprising a polynucleotide sequence encoding: (i) R12 scFv comprising SEQ ID NO: 4875; (ii) Spacer 14 comprising or consisting of SEQ ID NO:4842, and optionally a Gly-Ser linker of SEQ ID NO:4818 or 5088; (iii) a transmembrane domain comprising SEQ ID NO: 4868 and optionally (iv) a 4-1BB costimulatory domain comprising SEQ ID NO: 4869. In some aspects, the lentiviral vector further comprises a polynucleotide sequence encoding (v) CD3z comprising SEQ ID NO: 4870; (vi) P2A comprising SEQ ID NO: 4871; (vii) EGFRt comprising SEQ ID NO: 4872, or any combination thereof.

[0637] In some aspects, the present disclosure provides a lentiviral vector comprising a polynucleotide sequence encoding: (i) R12 scFv comprising SEQ ID NO: 4875; (ii) a Gly-Ser linker of SEQ ID NO:4818 or 5088, (iii) Spacer 1 comprising or consisting of SEQ ID NO:4830, (iv) a transmembrane domain comprising SEQ ID NO: 4868 and optionally (v) a 4-1BB costimulatory domain comprising SEQ ID NO: 4869. In some aspects, the lentiviral vector further comprises a polynucleotide sequence encoding (vi) CD3z comprising SEQ ID NO: 4870; (vii) P2A comprising SEQ ID NO: 4871; (viii) EGFRt comprising SEQ ID NO: 4872, or any combination thereof.

[0638] In some aspects, the present disclosure provides a lentiviral vector comprising a polynucleotide sequence encoding: (i) R12 scFv comprising SEQ ID NO: 4875; (ii) a Gly-Ser linker of SEQ ID NO:4818 or 5088, (iii) Spacer 15 comprising or consisting of SEQ ID NO:4843, (iv) a transmembrane domain comprising SEQ ID NO: 4868 and optionally (v) a 4-1BB costimulatory domain comprising SEQ ID NO: 4869. In some aspects, the lentiviral vector further comprises a polynucleotide sequence encoding (vi) CD3z comprising SEQ ID NO: 4870; (vii) P2A comprising SEQ ID NO: 4871; (viii) EGFRt comprising SEQ ID NO: 4872, or any combination thereof.

[0639] In some aspects, the present disclosure provides a lentiviral vector comprising a polynucleotide sequence encoding: (i) R12 scFv comprising SEQ ID NO: 4875; (ii) a Gly-Ser linker of SEQ ID NO:4818 or 5088, (iii) Spacer 21 comprising or consisting of SEQ ID NO:4849, (iv) a transmembrane domain comprising SEQ ID NO: 4868 and optionally (v) a 4-1BB costimulatory domain comprising SEQ ID NO: 4869. In some aspects, the lentiviral vector further comprises a polynucleotide sequence encoding (vi) CD3z comprising SEQ ID NO: 4870; (vii) P2A comprising SEQ ID NO: 4871; (viii) EGFRt comprising SEQ ID NO: 4872, or any combination thereof.

[0640] In some aspects, the present disclosure provides a lentiviral vector comprising a polynucleotide sequence encoding: (i) R11 scFv comprising SEQ ID NO: 5048; (ii) a Gly-Ser linker of SEQ ID NO:4818 or 5088, (iii) Spacer 4 comprising or consisting of SEQ ID NO:4833, (iv) a transmembrane domain comprising SEQ ID NO: 4868 and optionally (v) a 4-1BB costimulatory domain comprising SEQ ID NO: 4869. In some aspects, the lentiviral vector further comprises a polynucleotide sequence encoding (vi) CD3z comprising SEQ ID NO: 4870; (vii) P2A comprising SEQ ID NO: 4871; (viii) EGFRt comprising SEQ ID NO: 4872, or any combination thereof.

[0641] In some aspects, the present disclosure provides a lentiviral vector comprising a polynucleotide sequence encoding: (i) R11 scFv comprising SEQ ID NO: 5048; (ii) a Gly-Ser linker of SEQ ID NO:4818 or 5088, (iii) Spacer 5 comprising or consisting of SEQ ID NO:4834, (iv) a transmembrane domain comprising SEQ ID NO: 4868 and optionally (v) a 4-1BB costimulatory domain comprising SEQ ID NO: 4869. In some aspects, the lentiviral vector further comprises a polynucleotide sequence encoding (vi) CD3z comprising SEQ ID NO: 4870; (vii) P2A comprising SEQ ID NO: 4871; (viii) EGFRt comprising SEQ ID NO: 4872, or any combination thereof.

[0642] In some aspects, the present disclosure provides a lentiviral vector comprising a polynucleotide sequence encoding: (i) R11 scFv comprising SEQ ID NO: 5048; (ii) a Gly-Ser linker of SEQ ID NO:4818 or 5088, (iii) Spacer 6 comprising or consisting of SEQ ID NO:4835, (iv) a transmembrane domain comprising SEQ ID NO: 4868 and optionally (v) a 4-1BB costimulatory domain comprising SEQ ID NO: 4869. In some aspects, the lentiviral vector further comprises a polynucleotide sequence encoding (vi) CD3z comprising SEQ ID NO: 4870; (vii) P2A comprising SEQ ID NO: 4871; (viii) EGFRt comprising SEQ ID NO: 4872, or any combination thereof.

[0643] In some aspects, the present disclosure provides a lentiviral vector comprising a polynucleotide sequence encoding: (i) 2A2 scFv comprising SEQ ID NO: 5047; (ii) a Gly-Ser linker of SEQ ID NO:4818 or 5088, (iii) Spacer 13 comprising or consisting of SEQ ID NO:4841, (iv) a transmembrane domain comprising SEQ ID NO: 4868 and optionally (v) a 4-1BB costimulatory domain comprising SEQ ID NO: 4869. In some aspects, the lentiviral vector further comprises a polynucleotide sequence encoding (vi) CD3z comprising SEQ ID NO: 4870; (vii) P2A comprising SEQ ID NO: 4871; (viii) EGFRt comprising SEQ ID NO: 4872, or any combination thereof.

[0644] In some aspects, the present disclosure provides a lentiviral vector comprising a polynucleotide sequence encoding: (i) 2A2 scFv comprising SEQ ID NO: 5047; (ii) a Gly-Ser linker of SEQ ID NO:4818 or 5088, (iii) Spacer 21 comprising or consisting of SEQ ID NO:4889, (iv) a transmembrane domain comprising SEQ ID NO: 4868 and optionally (v) a 4-1BB costimulatory domain comprising SEQ ID NO: 4869. In some aspects, the lentiviral vector further comprises a polynucleotide sequence encoding (vi) CD3z comprising SEQ ID NO: 4870; (vii) P2A comprising SEQ ID NO: 4871; (viii) EGFRt comprising SEQ ID NO: 4872, or any combination thereof.

[0645] In some aspects, the present disclosure provides a lentiviral vector comprising a polynucleotide sequence encoding: (i) R2A2 scFv comprising SEQ ID NO: 5047; (ii) a Gly-Ser linker of SEQ ID NO:4818 or 5088, (iii) Spacer 28 comprising or consisting of SEQ ID NO:4856, (iv) a transmembrane domain comprising SEQ ID NO: 4868 and optionally (v) a 4-1BB costimulatory domain comprising SEQ ID NO: 4869. In some aspects, the lentiviral vector further comprises a polynucleotide sequence encoding (vi) CD3z comprising SEQ ID NO: 4870; (vii) P2A comprising SEQ ID NO: 4871; (viii) EGFRt comprising SEQ ID NO: 4872, or any combination thereof.

[0646] In some aspects, the present disclosure provides a lentiviral vector comprising a polynucleotide sequence encoding: (i) R12 scFv comprising SEQ ID NO: 4875; (ii) a Gly-Ser linker of SEQ ID NO:4818 or 5088, (iii) a spacer derived from a human immunoglobulin hinge and/or constant region or a functional fragment thereof, (iv) a transmembrane domain comprising SEQ ID NO: 4868 and optionally (v) a 4-1BB costimulatory domain comprising SEQ ID NO: 4869, wherein the combined length of the linker (ii) and spacer (iii) is between 35 Å and 55 Å. In some aspects, the lentiviral vector further comprises a polynucleotide sequence encoding (vi) CD3z comprising SEQ ID NO: 4870; (vii) P2A comprising SEQ ID NO: 4871; (viii) EGFRt comprising SEQ ID NO: 4872, or any combination thereof.

[0647] In some aspects, the present disclosure provides a lentiviral vector comprising a polynucleotide sequence encoding: (i) R12 scFv comprising SEQ ID NO: 4875; (ii) a Gly-Ser linker of SEQ ID NO:4818 or 5088, (iii) a spacer derived from a human immunoglobulin hinge and/or constant region or a functional fragment thereof, (iv) a transmembrane domain comprising SEQ ID NO: 4868 and optionally (v) a 4-1BB costimulatory domain comprising SEQ ID NO: 4869, wherein the combined length of the linker (ii) and spacer (iii) is about 45 Å. In some aspects, the lentiviral vector further comprises a polynucleotide sequence encoding (vi) CD3z comprising SEQ ID NO: 4870; (vii) P2A comprising SEQ ID NO: 4871; (viii) EGFRt comprising SEQ ID NO: 4872, or any combination thereof.

[0648] In some aspects, the present disclosure provides a lentiviral vector comprising a polynucleotide sequence encoding: (i) R11 scFv comprising SEQ ID NO: 5048; (ii) a Gly-Ser linker of SEQ ID NO:4818 or 5088, (iii) a spacer derived from a human immunoglobulin hinge and/or constant region or a functional fragment thereof, (iv) a transmembrane domain comprising SEQ ID NO: 4868 and optionally (v) a 4-1BB costimulatory domain comprising SEQ ID NO: 4869, wherein the combined length of the linker (ii) and spacer (iii) is between 180 Å and 250 Å. In some aspects, the lentiviral vector further comprises a polynucleotide sequence encoding (vi) CD3z comprising SEQ ID NO: 4870; (vii) P2A comprising SEQ ID NO: 4871; (viii) EGFRt comprising SEQ ID NO: 4872, or any combination thereof.

[0649] In some aspects, the present disclosure provides a lentiviral vector comprising a polynucleotide sequence encoding: (i) R11 scFv comprising SEQ ID NO: 5048; (ii) a Gly-Ser linker of SEQ ID NO:4818 or 5088, (iii) a spacer derived from a human immunoglobulin hinge and/or constant region or a functional fragment thereof, (iv) a transmembrane domain comprising SEQ ID NO: 4868 and optionally (v) a 4-1BB costimulatory domain comprising SEQ ID NO: 4869, wherein the combined length of the linker (ii) and spacer (iii) is about 200 Å. In some aspects, the lentiviral vector further comprises a polynucleotide sequence encoding (vi) CD3z comprising SEQ ID NO: 4870; (vii) P2A comprising SEQ ID NO: 4871; (viii) EGFRt comprising SEQ ID NO: 4872, or any combination thereof.

[0650] In some aspects, the present disclosure provides a lentiviral vector comprising a polynucleotide sequence encoding: (i) 2A2 scFv comprising SEQ ID NO: 5047; (ii) a Gly-Ser linker of SEQ ID NO:4818 or 5088, (iii) a spacer derived from a human immunoglobulin hinge and/or constant region or a functional fragment thereof, (iv) a transmembrane domain comprising SEQ ID NO: 4868 and optionally (v) a 4-1BB costimulatory domain comprising SEQ ID NO: 4869, wherein the combined length of the linker (ii) and spacer (iii) is between 35 Å and 55 Å. In some aspects, the lentiviral vector further comprises a polynucleotide sequence encoding (vi) CD3z comprising SEQ ID NO: 4870; (vii) P2A comprising SEQ ID NO: 4871; (viii) EGFRt comprising SEQ ID NO: 4872, or any combination thereof.

[0651] In some aspects, the present disclosure provides a lentiviral vector comprising a polynucleotide sequence encoding: (i) 2A2 scFv comprising SEQ ID NO: 5047; (ii) a Gly-Ser linker of SEQ ID NO:4818 or 5088, (iii) a spacer derived from a human immunoglobulin hinge and/or constant region or a functional fragment thereof, (iv) a transmembrane domain comprising SEQ ID NO: 4868 and optionally (v) a 4-1BB costimulatory domain comprising SEQ ID NO: 4869, wherein the combined length of the linker (ii) and spacer (iii) is about 45 Å. In some aspects, the lentiviral vector further comprises a polynucleotide sequence encoding (vi) CD3z comprising SEQ ID NO: 4870; (vii) P2A comprising SEQ ID NO: 4871; (viii) EGFRt comprising SEQ ID NO: 4872, or any combination thereof.

[0652] In some aspects, the present disclosure provides a lentiviral vector comprising a polynucleotide sequence encoding a CAR comprising, consisting, or consisting essentially of a sequence set forth in SEQ ID NOS: 5049 to 5063. In some aspects, the present disclosure provides a lentiviral vector comprising a polynucleotide sequence encoding: (i) FMC63 scFv comprising SEQ ID NO: 4866; (ii) Spacer 7 comprising or consisting of SEQ ID NO: 4836, and optionally a Gly-Ser linker of SEQ ID NO:4818 or 5088; (iii) a transmembrane domain comprising SEQ ID NO: 4877 and optionally (iv) a 4-1BB costimulatory domain comprising SEQ ID NO: 4878. In some aspects, the lentiviral vector further comprises a polynucleotide sequence encoding (v) CD3z comprising SEQ ID NO: 4879; (vi) P2A comprising SEQ ID NO: 4880; (vii) EGFRt comprising SEQ ID NO: 4881, or any combination thereof.

[0653] In some aspects, the present disclosure provides a lentiviral vector comprising a polynucleotide sequence encoding: (i) FMC63 scFv comprising SEQ ID NO: 4866; (ii) Spacer 8 comprising or consisting of SEQ ID NO: 4837, and optionally a Gly-Ser linker of SEQ ID NO:4818 or 5088; (iii) a transmembrane domain comprising SEQ ID NO: 4877 and optionally (iv) a 4-1BB costimulatory domain comprising SEQ ID NO: 4878. In some aspects, the lentiviral vector further comprises a polynucleotide sequence encoding (v) CD3z comprising SEQ ID NO: 4879; (vi) P2A comprising SEQ ID NO: 4880; (vii) EGFRt comprising SEQ ID NO: 4881, or any combination thereof.

[0654] In some aspects, the present disclosure provides a lentiviral vector comprising a polynucleotide sequence encoding: (i) FMC63 scFv comprising SEQ ID NO: 4866; (ii) Spacer 9 comprising or consisting of SEQ ID NO: 4838, and optionally a Gly-Ser linker of SEQ ID NO:4818 or 5088; (iii) a transmembrane domain comprising SEQ ID NO: 4877 and optionally (iv) a 4-1BB costimulatory domain comprising SEQ ID NO: 4878. In some aspects, the lentiviral vector further comprises a polynucleotide sequence encoding (v) CD3z comprising SEQ ID NO: 4879; (vi) P2A comprising SEQ ID NO: 4880; (vii) EGFRt comprising SEQ ID NO: 4881, or any combination thereof.

[0655] In some aspects, the present disclosure provides a lentiviral vector comprising a polynucleotide sequence encoding: (i) FMC63 scFv comprising SEQ ID NO: 4866; (ii) Spacer 10 comprising or consisting of SEQ ID NO: 4939, and optionally a Gly-Ser linker of SEQ ID NO:4818 or 5088; (iii) a transmembrane domain comprising SEQ ID NO: 4877 and optionally (iv) a 4-1BB costimulatory domain comprising SEQ ID NO: 4878. In some aspects, the lentiviral vector further comprises a polynucleotide sequence encoding (v) CD3z comprising SEQ ID NO: 4879; (vi) P2A comprising SEQ ID NO: 4880; (vii) EGFRt comprising SEQ ID NO: 4881, or any combination thereof.

[0656] In some aspects, the present disclosure provides a lentiviral vector comprising a polynucleotide sequence encoding: (i) FMC63 scFv comprising SEQ ID NO: 4866; (ii) Spacer 11 comprising or consisting of SEQ ID NO: 4840, and optionally a Gly-Ser linker of SEQ ID NO:4818 or 5088; (iii) a transmembrane domain comprising SEQ ID NO: 4877 and optionally (iv) a 4-1BB costimulatory domain comprising SEQ ID NO: 4878. In some aspects, the lentiviral vector further comprises a polynucleotide sequence encoding (v) CD3z comprising SEQ ID NO: 4879; (vi) P2A comprising SEQ ID NO: 4880; (vii) EGFRt comprising SEQ ID NO: 4881, or any combination thereof.

[0657] In some aspects, the present disclosure provides a lentiviral vector comprising a polynucleotide sequence encoding: (i) FMC63 scFv comprising SEQ ID NO: 4866; (ii) Spacer 14 comprising or consisting of SEQ ID NO: 4842, and optionally a Gly-Ser linker of SEQ ID NO:4818 or 5088; (iii) a transmembrane domain comprising SEQ ID NO: 4877 and optionally (iv) a 4-1BB costimulatory domain comprising SEQ ID NO: 4878. In some aspects, the lentiviral vector further comprises a polynucleotide sequence encoding (v) CD3z comprising SEQ ID NO: 4879; (vi) P2A comprising SEQ ID NO: 4880; (vii) EGFRt comprising SEQ ID NO: 4881, or any combination thereof.

[0658] In some aspects, the present disclosure provides a lentiviral vector comprising a polynucleotide sequence encoding: (i) FMC63 scFv comprising SEQ ID NO: 4866; (ii) Spacer 16 comprising or consisting of SEQ ID NO: 4844, and optionally a Gly-Ser linker of SEQ ID NO:4818 or 5088; (iii) a transmembrane domain comprising SEQ ID NO: 4877 and optionally (iv) a 4-1BB costimulatory domain comprising SEQ ID NO: 4878. In some aspects, the lentiviral vector further comprises a polynucleotide sequence encoding (v) CD3z comprising SEQ ID NO: 4879; (vi) P2A comprising SEQ ID NO: 4880; (vii) EGFRt comprising SEQ ID NO: 4881, or any combination thereof.

[0659] In some aspects, the present disclosure provides a lentiviral vector comprising a polynucleotide sequence encoding: (i) FMC63 scFv comprising SEQ ID NO: 4866; (ii) Spacer 28 comprising or consisting of SEQ ID NO: 4856, and optionally a Gly-Ser linker of SEQ ID NO:4818 or 5088; (iii) a transmembrane domain comprising SEQ ID NO: 4877 and optionally (iv) a 4-1BB costimulatory domain comprising SEQ ID NO: 4878. In some aspects, the lentiviral vector further comprises a polynucleotide sequence encoding (v) CD3z comprising SEQ ID NO: 4879; (vi) P2A comprising SEQ ID NO: 4880; (vii) EGFRt comprising SEQ ID NO: 4881, or any combination thereof.

[0660] In some aspects, the present disclosure provides a lentiviral vector comprising a polynucleotide sequence encoding: (i) FMC63 scFv comprising SEQ ID NO: 4866; (ii) Spacer 28 comprising or consisting of SEQ ID NO: 4856, and optionally a Gly-Ser linker of SEQ ID NO:4818 or 5088; (iii) a transmembrane domain comprising SEQ ID NO: 4877 and optionally (iv) a 4-1BB costimulatory domain comprising SEQ ID NO: 4878. In some aspects, the lentiviral vector further comprises a polynucleotide sequence encoding (v) CD3z comprising SEQ ID NO: 4879; (vi) P2A comprising SEQ ID NO: 4880; (vii) EGFRt comprising SEQ ID NO: 4881, or any combination thereof.

[0661] In some aspects, non-viral methods can be used to deliver a nucleic acid comprising a polynucleotide encoding a CAR of the present disclosure into a cell or tissue of a subject. In some aspects, the non-viral method includes the use of a transposon. In some aspects, use of a non-viral method of delivery permits reprogramming of cells, e.g., T or NK cells, and direct infusion of the cells into the subject. In some aspects, a nucleic acid sequence comprising a polynucleotide encoding a CAR of the present disclosure can be inserted into the genome of a target cell (e.g., a T cell) or a host cell (e.g., a cell for recombinant expression of the CAR polypeptide) by using CRISPR/Cas systems and genome edition alternatives such as zinc-finger nucleases (ZFNs), transcription activator-like effector nucleases (TALENs), and meganucleases (MNs).

[0662] In some, a CAR of the present disclosure (i.e., CAR comprising a CAR spacer of the present disclosure, i.e., a hinge derived CAR spacer, a loop derived CAR spacer, or a combination thereof) can be expressed in a cell using bicistronic or multicistronic expression vectors. In some aspects, bicistronic or multicistronic vectors include, but not limited to, (1) multiple promoters fused to multiple CARs' open reading frames; (2) insertion of splicing signals between units of a CAR; fusion of CARs of which expressions are driven by a single promoter; (3) insertion of proteolytic cleavage sites between units of CAR (self-cleavage peptide); and (iv) insertion of internal ribosomal entry sites (IRESs).

[0663] In some aspects, multiple CAR units are expressed in a single open reading frame (ORF), thereby creating a single polypeptide having multiple CAR units, wherein at least one of the CARs is a CAR of the present disclosure. In some aspects, an amino acid sequence or linker containing a high efficiency cleavage site is disposed between each CAR unit. As used herein, high cleavage efficiency is defined as more than 50%, more than 70%, more than 80%, or more than 90% of the translated protein is cleaved. Cleavage efficiency can be measured by Western Blot analysis.

[0664] Non-limiting examples of high efficiency cleavage sites include porcine teschovirus-1 2A (P2 Å), FMDV 2 Å (abbreviated herein as F2A); equine rhinitis A virus (ERAV) 2 Å (E2 Å); and Thoseaasigna virus 2 Å (T2A), cytoplasmic polyhedrosis virus 2 Å (BmCPV2A) and flacherie Virus 2 Å (BmIFV2A), or a combination thereof. In some aspects, the high efficiency cleavage site is P2A. High efficiency cleavage sites are described in Kim et al. (2011) High Cleavage Efficiency of a 2A Peptide Derived from Porcine Teschovirus-1 in Human Cell Lines, Zebrafish and Mice. PLoS ONE 6(4): e18556, the contents of which are incorporated herein by reference.

[0665] In some aspects, multiple CAR units are expressed in a single open reading frame (ORF), expression is under the control of a strong promoter.

[0666] In some aspects, the vector of the present disclosure further comprises an accessory gene. In some aspects, the accessory gene is a non-immunogenic selection tool, a tracking marker, or a suicide gene. In some aspects, the accessory gene is a truncated EGFR gene (EGFRt). An example of a truncated EGFR (EGFRt) gene that can be used in accordance with the embodiments described herein comprises SEQ ID NO: 4872 (includes the GMCSF signal peptide set forth in SEQ ID NO:4865) or SEQ ID NO:5064 (without signal peptide).

### Polynucleotide Modifications

[0667] In some aspects, a polynucleotide encoding a CAR of the present disclosure (i.e., CAR comprising a CAR spacer of the present disclosure, i.e., a hinge derived CAR spacer, a loop derived CAR spacer, or a combination thereof) can comprise at least one chemically modified nucleobase, sugar, backbone, or any combination thereof. Thus, a polynucleotide encoding a CAR of the present disclosure can comprise one or more modifications. In some aspects, a polynucleotide encoding a CAR of the present disclosure comprises at least one nucleotide analogue. In some aspects, at least one nucleotide analogue introduced by using IVT (in vitro transcription) or chemical synthesis is selected from the group consisting of a 2′-O-methoxyethyl-RNA (2′-MOE-RNA) monomer, a 2′-fluoro-DNA monomer, a 2′-O-alkyl-RNA monomer, a 2′-amino-DNA monomer, a locked nucleic acid (LNA) monomer, a cEt monomer, a cMOE monomer, a 5′-Me-LNA monomer, a 2′-(3-hydroxy)propyl-RNA monomer, an arabino nucleic acid (ANA) monomer, a 2′-fluoro-ANA monomer, an anhydrohexitol nucleic acid (HNA) monomer, an intercalating nucleic acid (INA) monomer, and a combination of two or more of said nucleotide analogues. In some aspects, the optimized nucleic acid molecule comprises at least one backbone modification, for example, a phosphorothioate internucleotide linkage.

[0668] In some aspects, a polynucleotide encoding a CAR of the present disclosure can be chemically modified at terminal locations, for example by introducing M (2′-O-methyl), MS (2′-O-methyl 3′ phosphorothioate), or MSP (2′-O-methy 3′thioPACE, phosphonoacetate) modifications, or combinations thereof at positions 1, 2, 3 respect to the 5′ and/or 3′ termini.

[0669] Modified polynucleotides encoding a CAR of the present disclosure (i.e., CAR comprising a CAR spacer of the present disclosure, i.e., a hinge derived CAR spacer, a loop derived CAR spacer, or a combination thereof) need not be uniformly modified along the entire length of the molecule. Different nucleotide modifications and/or backbone structures may exist at various positions in the nucleic acid. One of ordinary skill in the art will appreciate that the nucleotide analogs or other modification(s) may be located at any position(s) of a nucleic acid such that the function of the nucleic acid is not substantially decreased. A modification may also be a 5′ or 3′ terminal modification. The nucleic acids may contain at a minimum one and at maximum 100% modified nucleotides, or any intervening percentage, such as at least about 20%, at least about 25%, at least about 30%, at least about 35%, at least about 40%, at least about 45%, at least about 50%, at least about 55%, at least about 60%, at least about 65%, at least about 70%, at least about 75%, at least about 80%, at least about 85%, at least about 90%, at least about 95%, or at least about 99% modified nucleotides.

[0670] In some aspects, a polynucleotide encoding a CAR of the present disclosure (i.e., CAR comprising a CAR spacer of the present disclosure, i.e., a hinge derived CAR spacer, a loop derived CAR spacer, or a combination thereof) can include modifications to prevent rapid degradation by endo- and exo-nucleases. Modifications include, but are not limited to, for example, (a) end modifications, e.g., 5′ end modifications (phosphorylation dephosphorylation, conjugation, inverted linkages, etc.), 3′ end modifications (conjugation, DNA nucleotides, inverted linkages, etc.), (b) base modifications, e.g., replacement with modified bases, stabilizing bases, destabilizing bases, or bases that base pair with an expanded repertoire of partners, or conjugated bases, (c) sugar modifications (e.g., at the 2′ position or 4′ position) or replacement of the sugar, as well as (d) internucleoside linkage modifications, including modification or replacement of the phosphodiester linkages.

[0671] Specific examples of synthetic, modified polynucleotides encoding a CAR of the present disclosure (i.e., CAR comprising a CAR spacer of the present disclosure, i.e., a hinge derived CAR spacer, a loop derived CAR spacer, or a combination thereof) useful with the methods described herein include, but are not limited to, polynucleotides encoding a CAR of the present disclosure containing modified or non-natural internucleoside linkages. Synthetic, modified polynucleotides encoding a CAR of the present disclosure having modified internucleoside linkages include, among others, those that do not have a phosphorus atom in the internucleoside linkage. In some aspects, a synthetic, modified polynucleotide encoding a CAR of the present disclosure has a phosphorus atom in its internucleoside linkage(s).

[0672] Non-limiting examples of modified internucleoside linkages include phosphorothioates, chiral phosphorothioates, phosphorodithioates, phosphotriesters, aminoalkylphosphotriesters, methyl and other alkyl phosphonates including 3′-alkylene phosphonates and chiral phosphonates, phosphinates, phosphoramidates including 3′-amino phosphoramidate and aminoalkylphosphoramidates, thionophosphoramidates, thionoalkylphosphonates, thionoalkylphosphotriesters, and boranophosphates having normal 3′-5′ linkages, T-5′ linked analogs of these, and those) having inverted polarity wherein the adjacent pairs of nucleoside units are linked 3′-5′ to 5′-3′ or T-5′ to 5′-T. Various salts, mixed salts and free acid forms are also included.

[0673] Modified internucleoside linkages that do not include a phosphorus atom therein have internucleoside linkages that are formed by short chain alkyl or cycloalkyl internucleoside linkages, mixed heteroatoms and alkyl or cycloalkyl internucleoside linkages, or one or more short chain heteroatomic or heterocyclic internucleoside linkages. These include those having morpholino linkages (formed in part from the sugar portion of a nucleoside); siloxane backbones; sulfide, sulfoxide and sulfone backbones; formacetyl and thioformacetyl backbones; methylene formacetyl and thioformacetyl backbones; alkene containing backbones; sulfamate backbones; methyleneimino and methylenehydrazino backbones; sulfonate and sulfonamide backbones; amide backbones; and others having mixed N, O, S and CH2 component parts.

[0674] In some aspects, a polynucleotide encoding a CAR of the present disclosure (i.e., CAR comprising a CAR spacer of the present disclosure, i.e., a hinge derived CAR spacer, a loop derived CAR spacer, or a combination thereof) can be codon optimized by introducing one or more synonymous codon changes. As used herein, the terms “codon optimization,” “codon optimized,” and grammatical variants thereof refer to the modification of the primary sequence of a nucleic acid by replacing synonymous codons in order to increase its translational efficiency. Accordingly, codon optimization comprises switching the codons used in a polynucleotide encoding a CAR of the present disclosure without changing the amino acid sequence that it encodes for, which typically dramatically increases the abundance of the protein the codon optimized gene encodes because it generally removes “rare” codons and replaces them with abundant codons, or removes codon with a low tRNA recharge rate with codon with high tRNA recharge rates. Such codon optimization can, for example, (i) improve protein yield in recombinant protein expression, or (ii) improve the stability, half life, or other desirable property of an mRNA or a DNA encoding a binding molecule disclosed herein, wherein such mRNA or DNA is administered to a subject in need thereof.

[0675] The sequences of polynucleotides encoding a CAR of the present disclosure (i.e., CAR comprising a CAR spacer of the present disclosure, i.e., a hinge derived CAR spacer, a loop derived CAR spacer, or a combination thereof) can be codon optimized using any methods known in the art at the time the present application was filed.

[0676] In some aspects, a polynucleotide encoding a CAR of the present disclosure (i.e., CAR comprising a CAR spacer of the present disclosure, i.e., a hinge derived CAR spacer, a loop derived CAR spacer, or a combination thereof) has been sequence optimized. As used herein, the term “sequence optimized” refers to the modification of the sequence of a nucleic acid by to introduce features that increase its translational efficiency, remove features that reduce its translational efficiency, or in general improve properties related to expression efficacy after administration in vivo. Such properties include, but are not limited to, improving nucleic acid stability (e.g., mRNA stability), increasing translation efficacy in the target tissue, reducing the number of truncated proteins expressed, improving the folding or prevent misfolding of the expressed proteins, reducing toxicity of the expressed products, reducing cell death caused by the expressed products, or increasing and/or decreasing protein aggregation

[0677] The present disclosure contemplates modifications to the entire CAR construct e.g., modifications in one or more amino acid sequences of the various domains of the CAR construct in order to generate functionally equivalent molecules. The CAR construct can be modified to retain at least about 70%, 71%, 72%, 73%, 74%, 75%, 76%, 77%, 78%, 79%, 80%, 81%, 82%, 83%, 84%, 85%, 86%, 87%, 88%, 89%, 90%, 91%, 92%, 93%, 94%, 95%, 96%, 97%, 98%, 99% sequence identity of the starting CAR construct. The present disclosure also contemplates modifications of specific regions of a CAR, e.g., modifications in one or more amino acid sequences of one or more CDRs of a CAR construct in order to generate functionally equivalent molecules.

### Cells

[0678] The present disclosure also provides a genetically modified cell comprising a polynucleotide encoding a CAR of the present disclosure (i.e., CAR comprising a CAR spacer of the present disclosure, i.e., a hinge derived CAR spacer, a loop derived CAR spacer, or a combination thereof). In some aspects, the CAR is recombinantly expressed by a cell genetically modified to express a CAR, wherein the cell comprises by one or more of the polynucleotide sequences or the vectors encoding a CAR of the present disclosure.

[0679] In some aspects, the genetically modified cell disclosed herein has been transfected with a polynucleotide or vector encoding a CAR of the present disclosure. The term “transfected” (or equivalent terms “transformed” and “transduced”) refers to a process by which exogenous nucleic acid, e.g., a polynucleotide or vector encoding a CAR of the present disclosure, is transferred or introduced into the genome of the host cell, e.g., a T cell. A “transfected” cell is one which has been transfected, transformed or transduced with exogenous nucleic acid, e.g., a polynucleotide or vector encoding a CAR of the present disclosure. The cell includes the primary subject cell and its progeny.

[0680] In some aspects, the cell (e.g., T cell) is transfected with a vector of the present disclosure, e.g., an AAV vector or a lentiviral vector. In some such aspects, the cell may stably express the CAR of the present disclosure.

[0681] In some aspects, the cell (e.g., T cell) is transfected with a nucleic acid, e.g., mRNA, cDNA, DNA, encoding a CAR of the present disclosure. In some such aspects, the cell may transiently express the CAR of the present disclosure. For example, an RNA construct can be directly transfected into a cell. A method for generating mRNA for use in transfection involves in vitro transcription (IVT) of a template with specially designed primers, followed by polyA addition, to produce a construct containing 3′ and 5′ untranslated sequence (UTR), a 5′ cap and/or Internal Ribosome Entry Site (IRES), the nucleic acid to be expressed, and a polyA tail, typically 50-2000 bases in length. RNA so produced can efficiently transfect different kinds of cells. In some aspects, the template includes sequences for the CAR of the present disclosure. In an aspect, an RNA CAR vector is transduced into a T cell by electroporation.

[0682] In some aspects, the cell is an immune effector cell. As used herein, term “immune effector cell” refers to a cell that is involved in an immune response, e.g., in the promotion of an immune effector response. “Immune effector function” or “immune effector response,” refer to function or response, e.g., of an immune effector cell, that enhances or promotes an immune attack of a target cell. E.g., an immune effector function or response refers a property of a T or NK cell that promotes killing or the inhibition of growth or proliferation, of a target cell. In the case of a T cell, primary stimulation and co-stimulation are examples of immune effector function or response.

[0683] The term “effector function” refers to a specialized function of a cell. Effector function of a T cell, for example, may be cytolytic activity or helper activity including the secretion of cytokines. The intracellular signaling domain of a CAR can generate a signal that promotes an immune effector function of the CAR containing cell, e.g., a CART cell. Examples of immune effector function, e.g., in a CART cell, include cytolytic activity and helper activity, including the secretion of cytokines. In some aspects, the intracellular signal domain is the portion of the CAR which transduces the effector function signal and directs the cell to perform a specialized function. While the entire intracellular signaling domain can be employed, in many cases it is not necessary to use the entire chain. To the extent that a truncated portion of the intracellular signaling domain is used, such truncated portion may be used in place of the intact chain as long as it transduces the effector function signal. The term intracellular signaling domain is thus meant to include any truncated portion of the intracellular signaling domain sufficient to transduce the effector function signal.

[0684] In some aspects, the intracellular signaling domain can comprise a primary intracellular signaling domain. Exemplary primary intracellular signaling domains include those derived from the molecules responsible for primary stimulation, or antigen dependent simulation. In some aspects, the intracellular signaling domain can comprise a costimulatory intracellular domain. Exemplary costimulatory intracellular signaling domains include those derived from molecules responsible for costimulatory signals, or antigen independent stimulation. For example, in the case of a CART, a primary intracellular signaling domain can comprise a cytoplasmic sequence of a T cell receptor, and a costimulatory intracellular signaling domain can comprise cytoplasmic sequence from co-receptor or costimulatory molecule.

[0685] A primary intracellular signaling domain can comprise a signaling motif which is known as an immunoreceptor tyrosine-based activation motif or ITAM. Examples of ITAM containing primary cytoplasmic signaling sequences include, but are not limited to, those derived from CD3 zeta, FcR gamma, common FcR gamma (FCER1G), Fc gamma RIIa, FcR beta (Fc Epsilon Rib), CD3 gamma, CD3 delta, CD3 epsilon, CD22, CD79a, CD79b, CD278 (“ICOS”), FcεRI, CD66d, CD32, DAP10 and DAP12.

[0686] Examples of immune effector cells include, e.g., T cells, e.g., alpha/beta T cells and gamma/delta T cells, B cells, natural killer (NK) cells, natural killer T (NKT) cells, mast cells, and myeloid-derived phagocytes. Innate lymphoid cells (ILCs) are a group of innate immune cells that are derived from common lymphoid progenitor (CLP) and belong to the lymphoid lineage. These cells are defined by absence of antigen specific B or T cell receptor because of the lack of recombination activating gene (RAG). ILCs do not express myeloid or dendritic cell markers. TLCs has varying physiological functions; some functions are analogous to helper T cells, while the group also includes cytotoxic NK cells. Accordingly, in some aspects, the cell genetically modified to express a CAR of the present disclosure is, e.g., a T cell, an NK cell, an NKT cell, or an ILC cell.

[0687] T cells can be obtained from a number of sources, including peripheral blood mononuclear cells, bone marrow, lymph node tissue, cord blood, thymus tissue, tissue from a site of infection, ascites, pleural effusion, spleen tissue, and tumors.

### Pharmaceutical Compositions

[0688] The present disclosure also provides pharmaceutical compositions comprising compositions disclosed herein, e.g., a polynucleotide encoding a CAR of the present disclosure, a vector comprising a polynucleotide encoding a CAR of the present disclosure, or a genetically modified cell comprising a polynucleotide or a vector encoding a CAR of the present disclosure, which are suitable for administration to a subject.

[0689] The pharmaceutical compositions generally comprise polynucleotide, vector, or cell encoding or comprising a CAR of the present disclosure and a pharmaceutically-acceptable excipient or carrier in a form suitable for administration to a subject. Pharmaceutically acceptable excipients or carriers are determined in part by the particular composition being administered, as well as by the particular method used to administer the composition.

[0690] There is a wide variety of suitable formulations of pharmaceutical compositions comprising a CAR of the present disclosure (see, e.g., Remington's Pharmaceutical Sciences, Mack Publishing Co., Easton, Pa. 18th ed. (1990)). The pharmaceutical compositions are generally formulated sterile and in full compliance with all Good Manufacturing Practice (GMP) regulations of the U.S. Food and Drug Administration.

[0691] In certain aspects, the pharmaceutical composition is co-administered with of one or more additional therapeutic agents, in a pharmaceutically acceptable carrier. In some aspects, the pharmaceutical composition comprising the CAR of the present disclosure is administered prior to administration of the additional therapeutic agent(s). In other aspects, the pharmaceutical composition comprising the CAR of the present disclosure is administered after the administration of the additional therapeutic agent(s). In further aspects, the pharmaceutical composition comprising the CAR of the present disclosure is administered concurrently with the additional therapeutic agent(s).

[0692] Acceptable carriers, excipients, or stabilizers are nontoxic to recipients (e.g., animals or humans) at the dosages and concentrations employed, and include buffers such as phosphate, citrate, and other organic acids; antioxidants including ascorbic acid and methionine; preservatives (such as octadecyldimethylbenzyl ammonium chloride; hexamethonium chloride; benzalkonium chloride, benzethonium chloride; phenol, butyl or benzyl alcohol; alkyl parabens such as methyl or propyl paraben; catechol; resorcinol; cyclohexanol; 3-pentanol; and m-cresol); low molecular weight (less than about 10 residues) polypeptides; proteins, such as serum albumin, gelatin, or immunoglobulins; hydrophilic polymers such as polyvinylpyrrolidone; amino acids such as glycine, glutamine, asparagine, histidine, arginine, or lysine; monosaccharides, disaccharides, and other carbohydrates including glucose, mannose, or dextrins; chelating agents such as EDTA; sugars such as sucrose, mannitol, trehalose or sorbitol; salt-forming counter-ions such as sodium; metal complexes (e.g., Zn-protein complexes); and/or non-ionic surfactants such as TWEEN™, PLURONICS™ or polyethylene glycol (PEG).

[0693] Examples of carriers or diluents include, but are not limited to, water, saline, Ringer's solutions, dextrose solution, and 5% human serum albumin. The use of such media and compounds for pharmaceutically active substances is well known in the art. Except insofar as any conventional media or compound is incompatible with the compositions of the present disclosure (e.g., polynucleotides, vectors, or cells), use thereof in the compositions is contemplated.

### VI. Libraries and Methods of Use

[0694] The present disclosure also provides libraries comprising Ig hinges, fragment thereof, and combinations thereof (e.g., two or more Ig hinge fragments concatenated). The libraries of the present disclosure can be screened to identify polypeptides with the optimal length and composition to be used as CAR spacer, i.e., spacer resulting in CAR with enhanced activity with respect to a corresponding CAR comprising a reference spacer (e.g., a spacer comprising an IgG1 hinge).

[0695] In some aspects, spacer libraries can be generated by concatenating fragments of immunoglobulin hinges disclosed here (see disclosures about modular spacers above). A schematic representation of a small library generated from IgG3 modules is provided in FIG. 8. In some aspects, a spacer library of the present disclosure comprises Spacer 1 to Spacer 31 disclosed in FIG. 9. In some aspects, a spacer library of the present disclosure comprises Spacer 1 to Spacer 31 disclosed in FIG. 9 and/or variants thereof, e.g., spacers corresponding to Spacer 1 to Spacer 31 further comprising a flexible linker, e.g., a flexible linker of SEQ ID NO: 4818 or 5088, linked to the N-terminus and/or C-terminus of the amino sequence of Spacer 1 to Spacer 31 as set forth in FIG. 9.

[0696] The present disclosure also provides CAR libraries comprising, e.g., variants of a CAR in which the spacer is replaced by a spacer from a spacer library of the present disclosure (e.g., a library comprising the spacers disclosed in FIG. 9 or variants thereof). Also provided are CAR libraries comprising, e.g., variants of a CAR comprising a spacer disclosed herein (e.g., a spacer disclosed in FIG. 9) in which other CAR components are substituted, e.g., signal peptide, binding (e.g., scFv), transmembrane domain, costimulatory domain, signaling domain, or any combination thereof.

### VII. Indications

[0697] In some aspects, the compositions disclosed herein (e.g., polynucleotides encoding CARs of the present disclosure, vectors comprising polynucleotides encoding CARs of the present disclosure, CARs of the present disclosure, or cells expressing CARs of the present disclosure, .eg., CART cells) can be used to treat a disease or condition, e.g., a proliferative disease such as a cancer or malignancy or a precancerous condition such as a myelodysplasia, a myelodysplastic syndrome or a preleukemia.

[0698] A “cancer” refers to a broad group of various proliferative diseases characterized by the uncontrolled growth of abnormal cells in the body. Unregulated cell division and growth results in the formation of malignant tumors that invade neighboring tissues and can also metastasize to distant parts of the body through the lymphatic system or bloodstream. As used herein the term “proliferative” disorder or disease refers to unwanted cell proliferation of one or more subset of cells in a multicellular organism resulting in harm (i.e., discomfort or decreased life expectancy) to the multicellular organism. For example, as used herein, proliferative disorder or disease includes neoplastic disorders and other proliferative disorders. “Neoplastic,” as used herein, refers to any form of dysregulated or unregulated cell growth, whether malignant or benign, resulting in abnormal tissue growth. Thus, “neoplastic cells” include malignant and benign cells having dysregulated or unregulated cell growth. In some aspects, the cancer is a tumor. “Tumor,” as used herein, refers to all neoplastic cell growth and proliferation, whether malignant or benign, and all pre-cancerous and cancerous cells and tissues.

[0699] In some aspects, the disease is a solid or a liquid tumor. In some aspects, the cancer is a pancreatic cancer. In some aspects, the disease is a hematologic cancer. In some aspects, the hematologic cancer is a leukemia. In some aspects, the cancer is selected from the group consisting of one or more acute leukemias including but not limited to B-cell acute lymphoid leukemia (BALL), T-cell acute lymphoid leukemia (TALL), small lymphocytic leukemia (SLL), acute lymphoid leukemia (ALL) (e.g., relapsing and refractory ALL); one or more chronic leukemias including but not limited to chronic myelogenous leukemia (CML), and chronic lymphocytic leukemia (CLL). Additional hematologic cancers or conditions include, but are not limited to mantle cell lymphoma (MCL), B cell prolymphocytic leukemia, blastic plasmacytoid dendritic cell neoplasm, Burkitt's lymphoma, diffuse large B cell lymphoma, follicular lymphoma, hairy cell leukemia, small cell- or a large cell-follicular lymphoma, malignant lymphoproliferative conditions, MALT lymphoma, Marginal zone lymphoma, multiple myeloma, myelodysplasia and myelodysplastic syndrome, non-Hodgkin lymphoma, Hodgkin lymphoma, plasmablastic lymphoma, plasmacytoid dendritic cell neoplasm, Waldenstrom macroglobulinemia, and preleukemia. Preleukemia encompasses a diverse collection of hematological conditions united by ineffective production (or dysplasia) of myeloid blood cells. In some aspects, the indication is an atypical and/or non-classical cancer, malignancy, precancerous condition or proliferative disease; and any combination thereof.

[0700] In some aspects, the disease is a lymphoma, e.g., MCL or Hodgkin lymphoma. In some aspects, the disease is leukemia, e.g., SLL, CLL and/or ALL. In some aspects, the disease associated with a tumor antigen, e.g., a tumor antigen described herein, is selected from a proliferative disease such as a cancer or malignancy or a precancerous condition such as a myelodysplasia, a myelodysplastic syndrome or a preleukemia, or is a non-cancer related indication associated with expression of a tumor antigen described herein. In some aspects, the disease associated with a tumor antigen described herein is a solid tumor, e.g., a solid tumor described herein, e.g., prostatic, colorectal, pancreatic, cervical, gastric, ovarian, head, or lung cancer.

[0701] In some aspects, the cancer is chosen from AML, ALL, B-ALL, T-ALL, B-cell prolymphocytic leukemia, chronic lymphocytic leukemia, CML, hairy cell leukemia, Hodgkin lymphoma, mast cell disorder, myelodysplastic syndrome, myeloproliferative neoplasm, plasma cell myeloma, plasmacytoid dendritic cell neoplasm, or a combination thereof.

[0702] In some aspects, the compositions disclosed herein (e.g., polynucleotides encoding CARs of the present disclosure, vectors comprising polynucleotides encoding CARs of the present disclosure, CARs of the present disclosure, or cells expressing CARs of the present disclosure, e.g., CART cells) are used to reduce or decrease a size of a tumor or inhibit a tumor growth in a subject in need thereof. In some aspects, the tumor is a carcinoma (i.e., a cancer of epithelial origin). In some aspects, the tumor is, e.g., selected from the group consisting of gastric cancer, gastroesophageal junction cancer (GEJ), esophageal cancer, colorectal cancer, liver cancer (hepatocellular carcinoma, HCC), ovarian cancer, breast cancer, NSCLC, bladder cancer, lung cancer, pancreatic cancer, head and neck cancer, lymphoma, uterine cancer, renal or kidney cancer, biliary cancer, prostate cancer, testicular cancer, urethral cancer, penile cancer, thoracic cancer, rectal cancer, brain cancer (glioma and glioblastoma), cervical cancer, parotid cancer, larynx cancer, thyroid cancer, adenocarcinomas, neuroblastomas, melanoma, and Merkel Cell carcinoma.

[0703] A “cancer” or “cancer tissue” can include a tumor at various stages. In certain aspects, the cancer or tumor is stage 0, such that, e.g., the cancer or tumor is very early in development and has not metastasized. In some aspects, the cancer or tumor is stage I, such that, e.g., the cancer or tumor is relatively small in size, has not spread into nearby tissue, and has not metastasized. In other aspects, the cancer or tumor is stage II or stage III, such that, e.g., the cancer or tumor is larger than in stage 0 or stage I, and it has grown into neighboring tissues but it has not metastasized, except potentially to the lymph nodes. In other aspects, the cancer or tumor is stage IV, such that, e.g., the cancer or tumor has metastasized. Stage IV can also be referred to as advanced or metastatic cancer.

[0704] In some aspects, the cancer can include, but is not limited to, adrenal cortical cancer, advanced cancer, anal cancer, aplastic anemia, bileduct cancer, bladder cancer, bone cancer, bone metastasis, brain tumors, brain cancer, breast cancer, childhood cancer, cancer of unknown primary origin, Castleman disease, cervical cancer, colon/rectal cancer, endometrial cancer, esophagus cancer, Ewing family of tumors, eye cancer, gallbladder cancer, gastrointestinal carcinoid tumors, gastrointestinal stromal tumors, gestational trophoblastic disease, Hodgkin disease, Kaposi sarcoma, renal cell carcinoma, laryngeal and hypopharyngeal cancer, acute lymphocytic leukemia, acute myeloid leukemia, chronic lymphocytic leukemia, chronic myeloid leukemia, chronic myelomonocytic leukemia, liver cancer, non-small cell lung cancer, small cell lung cancer, lung carcinoid tumor, lymphoma of the skin, malignant mesothelioma, multiple myeloma, myelodysplastic syndrome, nasal cavity and paranasal sinus cancer, nasopharyngeal cancer, neuroblastoma, non-Hodgkin lymphoma, oral cavity and oropharyngeal cancer, osteosarcoma, ovarian cancer, pancreatic cancer, penile cancer, pituitary tumors, prostate cancer, retinoblastoma, rhabdomyosarcoma, salivary gland cancer, sarcoma in adult soft tissue, basal and squamous cell skin cancer, melanoma, small intestine cancer, stomach cancer, testicular cancer, throat cancer, thymus cancer, thyroid cancer, uterine sarcoma, vaginal cancer, vulvar cancer, Waldenstrom macroglobulinemia, Wilms tumor and secondary cancers caused by cancer treatment.

[0705] In some aspects, the tumor is a solid tumor. A “solid tumor” includes, but is not limited to, sarcoma, melanoma, carcinoma, or other solid tumor cancer. “Sarcoma” refers to a tumor which is made up of a substance like the embryonic connective tissue and is generally composed of closely packed cells embedded in a fibrillar or homogeneous substance. Sarcomas include, but are not limited to, chondrosarcoma, fibrosarcoma, lymphosarcoma, melanosarcoma, myxosarcoma, osteosarcoma, Abemethy's sarcoma, adipose sarcoma, liposarcoma, alveolar soft part sarcoma, ameloblastic sarcoma, botryoid sarcoma, chloroma sarcoma, chorio carcinoma, embryonal sarcoma, Wilms' tumor sarcoma, endometrial sarcoma, stromal sarcoma, Ewing's sarcoma, fascial sarcoma, fibroblastic sarcoma, giant cell sarcoma, granulocytic sarcoma, Hodgkin's sarcoma, idiopathic multiple pigmented hemorrhagic sarcoma, immunoblastic sarcoma of B cells, lymphoma, immunoblastic sarcoma of T-cells, Jensen's sarcoma, Kaposi's sarcoma, Kupffer cell sarcoma, angiosarcoma, leukosarcoma, malignant mesenchymoma sarcoma, parosteal sarcoma, reticulocytic sarcoma, Rous sarcoma, serocystic sarcoma, synovial sarcoma, or telangiectaltic sarcoma.

[0706] The term “melanoma” refers to a tumor arising from the melanocytic system of the skin and other organs. Melanomas include, for example, acra-lentiginous melanoma, amelanotic melanoma, benign juvenile melanoma, Cloudman's melanoma, S91 melanoma, Harding-Passey melanoma, juvenile melanoma, lentigo maligna melanoma, malignant melanoma, metastatic melanoma, nodular melanoma, subungal melanoma, or superficial spreading melanoma.

[0707] The term “carcinoma” refers to a malignant new growth made up of epithelial cells tending to infiltrate the surrounding tissues and give rise to metastases. Exemplary carcinomas include, e.g., acinar carcinoma, acinous carcinoma, adenocystic carcinoma, adenoid cystic carcinoma, carcinoma adenomatosum, carcinoma of adrenal cortex, alveolar carcinoma, alveolar cell carcinoma, basal cell carcinoma, carcinoma basocellulare, basaloid carcinoma, basosquamous cell carcinoma, bronchioalveolar carcinoma, bronchiolar carcinoma, bronchogenic carcinoma, cerebriform carcinoma, cholangiocellular carcinoma, chorionic carcinoma, colloid carcinoma, comedo carcinoma, corpus carcinoma, cribriform carcinoma, carcinoma en cuirasse, carcinoma cutaneum, cylindrical carcinoma, cylindrical cell carcinoma, duct carcinoma, carcinoma durum, embryonal carcinoma, encephaloid carcinoma, epiermoid carcinoma, carcinoma epitheliale adenoides, exophytic carcinoma, carcinoma ex ulcere, carcinoma fibrosum, gelatiniform carcinoma, gelatinous carcinoma, giant cell carcinoma, carcinoma gigantocellulare, glandular carcinoma, granulosa cell carcinoma, hair-matrix carcinoma, hematoid carcinoma, hepatocellular carcinoma, Hurthle cell carcinoma, hyaline carcinoma, hypemephroid carcinoma, infantile embryonal carcinoma, carcinoma in situ, intraepidermal carcinoma, intraepithelial carcinoma, Krompecher's carcinoma, Kulchitzky-cell carcinoma, large-cell carcinoma, lenticular carcinoma, carcinoma lenticulare, lipomatous carcinoma, lymphoepithelial carcinoma, carcinoma medullare, medullary carcinoma, melanotic carcinoma, carcinoma molle, mucinous carcinoma, carcinoma muciparum, carcinoma mucocellulare, mucoepidernoid carcinoma, carcinoma mucosum, mucous carcinoma, carcinoma myxomatodes, naspharyngeal carcinoma, oat cell carcinoma, carcinoma ossificans, osteoid carcinoma, papillary carcinoma, periportal carcinoma, preinvasive carcinoma, prickle cell carcinoma, pultaceous carcinoma, renal cell carcinoma of kidney, reserve cell carcinoma, carcinoma sarcomatodes, schneiderian carcinoma, scirrhous carcinoma, carcinoma scroti, signet-ring cell carcinoma, carcinoma simplex, small-cell carcinoma, solanoid carcinoma, spheroidal cell carcinoma, spindle cell carcinoma, carcinoma spongiosum, squamous carcinoma, squamous cell carcinoma, string carcinoma, carcinoma telangiectaticum, carcinoma telangiectodes, transitional cell carcinoma, carcinoma tuberosum, tuberous carcinoma, verrucous carcinoma, or carcinoma viflosum.

[0708] Additional cancers that can be treated with the compositions disclosed herein (e.g., polynucleotides encoding CARs of the present disclosure, vectors comprising polynucleotides encoding CARs of the present disclosure, CARs of the present disclosure, or cells expressing CARs of the present disclosure, e.g., CART cells) include, e.g., Leukemia, Hodgkin's Disease, Non-Hodgkin's Lymphoma, multiple myeloma, neuroblastoma, breast cancer, ovarian cancer, lung cancer, rhabdomyosarcoma, primary thrombocytosis, primary macroglobulinemia, small-cell lung tumors, primary brain tumors, stomach cancer, colon cancer, malignant pancreatic insulanoma, malignant carcinoid, urinary bladder cancer, premalignant skin lesions, testicular cancer, lymphomas, thyroid cancer, papillary thyroid cancer, neuroblastoma, neuroendocrine cancer, esophageal cancer, genitourinary tract cancer, malignant hypercalcemia, cervical cancer, endometrial cancer, adrenal cortical cancer, prostate cancer, Müllerian cancer, ovarian cancer, peritoneal cancer, fallopian tube cancer, or uterine papillary serous carcinoma.

### Methods

[0709] The present disclosure also provide methods for using of the CARs and CAR-expressing cells of the present disclosure for adoptive therapy. In some aspects, the present disclosure provides a method of stimulating a T cell-mediated immune response to a target cell population or tissue in a subject, comprising administering an effective amount of a cell expressing a CAR of the present disclosure to the subject. Also provided is a method of providing an anti-tumor immunity in a subject in need thereof, the method comprising administering to the subject an effective amount of a cell expressing a CAR of the present disclosure to the subject.

[0710] The disclosure also provides a method of treating cancer in a subject in need thereof comprising administering to the subject an effective amount of a cell expressing a CAR of the present disclosure. The disclosure also provides a method of preparing a population of cells, e.g. CART cells, for a therapy comprising transducing a population of cells isolated from a subject with the a polynucleotide or vector of the present disclosure. In some aspects, the transduction comprises culturing the cell under suitable condition.

[0711] The disclosure also provides a method of generating a persisting population of genetically engineered cells in a subject diagnosed with cancer, the method comprising administering to the subject a cell genetically engineered to express a CAR of the present disclosure.

[0712] The disclosure also provides a method of expanding a population of genetically engineered cells (e.g., T cells) in a subject diagnosed with cancer, the method comprising administering to the subject a cell (e.g., a T cell) genetically engineered to express a CAR of the present disclosure. In some aspects, the cell is a T cell, e.g., an autologous T cell. In other aspects, the T cell is a heterologous T cell. In some aspects of the methods disclosed herein, the subject is a human subject.

[0713] The present disclosure also provides a method to improve one or more properties of a CAR therapy comprising inserting an CAR spacer of the present disclosure between an antigen-binding domain and a transmembrane domain of a CAR, wherein the spacer is located between the ligand-binding domain and the transmembrane domain.

[0714] In some aspects, the one or more improved properties of the CAR therapy is increased secretion of one or more cytokines. In some aspects, the cytokine secretion induced by the CAR of the present disclosure, i.e., a CAR comprising a CAR spacer of the present disclosure, is increased with respect to the secretion observed after administration of a corresponding CAR comprising a reference spacer, e.g., an IgG1 hinge spacer. In some aspects, the cytokine is an interleukin, e.g., interleukin-2. In some aspect, the cytokine is an interferon, e.g., interferon-gamma.

[0715] In some aspects, administration of a CAR of the present disclosure results in an increase in interleukin (e.g., interleukin-2) secretion by at least about 10%, at least about 15%, at least about 20%, at least about 25%, at least about 30%, at least about 35%, at least about 40%, at least about 45%, at least about 50%, at least about 55%, at least about 60%, at least about 65%, at least about 70%, at least about 75%, at least about 80%, at least about 85%, at least about 90%, at least about 95%, or at least about 100% compared to the interleukin secretion observed after administration of a corresponding CAR comprising a reference spacer, e.g., an IgG1 hinge CAR spacer or a “short” reference spacer (SEQ ID NO:4911), instead of a CAR spacer of the present disclosure.

[0716] In some aspects, administration of a CAR of the present disclosure results in an increase in interferon (e.g., interferon-gamma) secretion by at least about 10%, at least about 15%, at least about 20%, at least about 25%, at least about 30%, at least about 35%, at least about 40%, at least about 45%, at least about 50%, at least about 55%, at least about 60%, at least about 65%, at least about 70%, at least about 75%, at least about 80%, at least about 85%, at least about 90%, at least about 95%, or at least about 100% compared to the interferon (e.g., interferon-gamma) secretion observed after administration of a corresponding CAR comprising a reference spacer, e.g., an IgG1 hinge CAR spacer or a “short” reference spacer (SEQ ID NO:4911), instead of a CAR spacer of the present disclosure.

[0717] In some aspects, administration of a CAR of the present disclosure results in an increase in TNFα secretion by at least about 10%, at least about 15%, at least about 20%, at least about 25%, at least about 30%, at least about 35%, at least about 40%, at least about 45%, at least about 50%, at least about 55%, at least about 60%, at least about 65%, at least about 70%, at least about 75%, at least about 80%, at least about 85%, at least about 90%, at least about 95%, or at least about 100% compared to the TNFα secretion observed after administration of a corresponding CAR comprising a reference spacer, e.g., an IgG1 hinge CAR spacer or a “short” reference spacer (SEQ ID NO:4911), instead of a CAR spacer of the present disclosure.

[0718] In some aspects, the present disclosure provides a method to select an optimal CAR spacer comprising comparing killing kinetics (Area Under Curve) versus cytokine (e.g., IL-2 and/or IFNg) in a library of CARs differing in the spacer used (e.g., the spacer is a spacer from the library provided in FIG. 9 or any spacer disclosed herein), and selecting the CAR with the lowest AUC and/or highest cytokine. Also provided is a method to optimize or improve a CAR comprising replacing the CAR's original spacer with a spacer disclosed herein (e.g., a spacer from the library provided in FIG. 9 or any spacer disclosed herein), comparing killing kinetics (Area Under Curve) and cytokine production (e.g., IL-2 and/or IFNg), and selecting the CAR with the lowest AUC and/or highest cytokine production.

[0719] The present disclosure also provides a method to select an optimal spacer comprising generating a library of CARs differing in the spacer used (e.g., the spacer is a spacer from the library provided in FIG. 9 or any spacer disclosed herein) and performing sequential kill experiments in which CAR T cells are continually passaged into new target cells until the CAR T cells stop proliferating and killing. The best CAR spacers would be those present in the CAR T cells that would have a more prolonged proliferation and killing activity.

[0720] In some aspects, the present disclosure provides a polynucleotide, vector, CAR, composition, kit, cell, or the pharmaceutical composition of the present disclosure for use as a medicament. In some aspects, the present disclosure provides a polynucleotide, vector, CAR, composition, kit, cell, or the pharmaceutical composition of the present disclosure for use as a medicament for the treatment of cancer in a subject in need thereof. In some aspects, the present disclosure provides a polynucleotide, vector, CAR, composition, kit, cell, or the pharmaceutical composition of the present disclosure for the treatment of cancer in a subject in need thereof. In some aspects, the present disclosure provides the use of a polynucleotide, vector, CAR, composition, kit, cell, or the pharmaceutical composition of the present disclosure for the manufacture of a medicament. In some aspects, the present disclosure provides the use of a polynucleotide, vector, CAR, composition, kit, cell, or the pharmaceutical composition of the present disclosure for the manufacture of a medicament for treating cancer in a subject in need thereof.

[0721] The present disclosure also provides a composition comprising a polynucleotide encoding a CAR, a vector comprising a polynucleotide encoding a CAR, or a genetically modified cell comprising a polynucleotide or a vector encoding a CAR for treating a subject in need of a CAR therapy. The present disclosure also provides a composition comprising a polynucleotide encoding a CAR, a vector comprising a polynucleotide encoding a CAR, or a genetically modified cell comprising a polynucleotide or a vector encoding a CAR for use as a medicament. Also provided is a composition comprising a polynucleotide encoding a CAR, a vector comprising a polynucleotide encoding a CAR, or a genetically modified cell comprising a polynucleotide or a vector encoding a CAR for used as treatment for cancer in a subject in need of a CAR therapy. Also provided is a composition comprising a polynucleotide encoding a CAR, a vector comprising a polynucleotide encoding a CAR, or a genetically modified cell comprising a polynucleotide or a vector encoding a CAR for the manufacture of a medicament for the treatment for cancer in a subject in need of a CAR therapy.

### Kits

[0722] The present disclosure also provides kits, or products of manufacture comprising (i) a CAR of the present disclosure (i.e., CAR comprising a CAR spacer of the present disclosure, i.e., a hinge derived CAR spacer, a loop derived CAR spacer, or a combination thereof), one or more polynucleotides encoding a CAR of the present disclosure, one or more vectors encoding a CAR of the present disclosure, or a composition comprising the polynucleotide(s) or vector(s), and optionally (ii) instructions for use, e.g., instructions for use according to the methods disclosed herein.

[0723] The disclosure also provides a kits comprising (i) a cell genetically modified to express a CAR of the present disclosure, i.e., a cell one or more polynucleotides encoding a CAR of the present disclosure, or one or more vectors encoding a CAR of the present disclosure (e.g., a T cell, a natural killer (NK) cell, an natural killer T (NKT) cell, or an ILC cell), or a pharmaceutical composition comprising the cell, and optionally (ii) instructions for use.

[0724] In some aspects, the kit or product of manufacture comprises at least a polynucleotide or vector encoding a CAR of the present disclosure, a cell genetically modified to express a CAR of the present disclosure, or a composition (e.g., a pharmaceutical composition) comprising a polynucleotide, vector, or cell disclosed herein, in one or more containers.

[0725] In some aspects, the kit or product of manufacture comprises at least a polynucleotide or vector encoding a CAR of the present disclosure, a cell genetically modified to express a CAR of the present disclosure, or a composition (e.g., a pharmaceutical composition) comprising a polynucleotide, vector, or cell disclosed herein, and optionally a brochure.

[0726] One skilled in the art will readily recognize that the polynucleotides, vectors, cells, and compositions of the present disclosure, pharmaceutical composition comprising the polynucleotides, vectors, or cells of the present disclosure, or combinations thereof can be readily incorporated into one of the established kit formats which are well known in the art.

[0727] In some aspects, the kit or product of manufacture comprises, e.g., a polynucleotide or vector encoding a CAR of the present disclosure, or a composition (e.g., a pharmaceutical composition) comprising a polynucleotide, vector, in dry form in a container (e.g., a glass vial), and optionally a vial with a solvent.

[0728] In some aspects, the kit or product of manufacture comprises, e.g., a polynucleotide or vector encoding a CAR of the present disclosure, or a composition (e.g., a pharmaceutical composition) comprising a polynucleotide, vector, in at least one container, and another or more containers with transfection reagents.

[0729] The practice of the present disclosure will employ, unless otherwise indicated, conventional techniques of cell biology, cell culture, molecular biology, transgenic biology, microbiology, recombinant DNA, and immunology, which are within the skill of the art. Such techniques are explained fully in the literature. See, for example, Sambrook et al., ed. (1989) Molecular Cloning A Laboratory Manual (2nd ed.; Cold Spring Harbor Laboratory Press); Sambrook et al., ed. (1992) Molecular Cloning: A Laboratory Manual, (Cold Springs Harbor Laboratory, NY); D. N. Glover ed., (1985) DNA Cloning, Volumes I and II; Gait, ed. (1984) Oligonucleotide Synthesis; Mullis et al. U.S. Pat. No. 4,683,195; Hames and Higgins, eds. (1984) Nucleic Acid Hybridization; Hames and Higgins, eds. (1984) Transcription And Translation; Freshney (1987) Culture Of Animal Cells (Alan R. Liss, Inc.); Immobilized Cells And Enzymes (IRL Press) (1986); Perbal (1984) A Practical Guide To Molecular Cloning; the treatise, Methods In Enzymology (Academic Press, Inc., N.Y.); Miller and Calos eds. (1987) Gene Transfer Vectors For Mammalian Cells, (Cold Spring Harbor Laboratory); Wu et al., eds., Methods In Enzymology, Vols. 154 and 155; Mayer and Walker, eds. (1987) Immunochemical Methods In Cell And Molecular Biology (Academic Press, London); Weir and Blackwell, eds., (1986) Handbook Of Experimental Immunology, Volumes I-IV; Manipulating the Mouse Embryo, Cold Spring Harbor Laboratory Press, Cold Spring Harbor, N.Y., (1986); ); Crooke, Antisense drug Technology: Principles, Strategies and Applications, 2nd Ed. CRC Press (2007) and in Ausubel et al. (1989) Current Protocols in Molecular Biology (John Wiley and Sons, Baltimore, Md.).

[0730] The following examples are offered by way of illustration and not by way of limitation.

### EXAMPLES

### Materials and Methods

[0731] To measure CAR expression and Transduction Efficiency, approximately 0.5×10⁶ cells were pelleted after a 6-day culturing post-transduction for flow cytometry analysis. Cells were resuspended in Fixable Viability Dye eFluor 780 (Invitrogen, Cat# 65-0865-14) in PBS for 10 minutes, then washed with Cell Staining Buffer (BioLegend, Cat# 420201).

[0732] FMC63 CARs scFv surface expression was detected using an anti-ID-AF647 (Lyell) diluted 1:2000 in Cell Staining Buffer. Transduction Efficiency was determined by surface staining of transduction marker EGFRt using anti-hEGFR-BV421 (BioLegend, Cat# 352911) diluted 1:40 in Cell Staining Buffer. Cells were pelleted after a 20 minutes incubation in the dark, followed by 2× wash with Cell Staining Buffer. All flow cytometric analysis was done on a ZE5 Cell Analyzer (Biorad) and analyzed with FlowJo (Tree Star).

[0733] Her CARs scFv surface expression was detected using Protein L-Biotin (Thermo Scientific, Cat# 29997) diluted 1:6000 in Cell Staining Buffer, followed by Strepavidin-BV421 (BioLegend, Cat# 405226) diluted 1:400 in Cell Staining Buffer. Transduction Efficiency was determined by surface staining of transduction marker EGFRt using anti-hEGFR-PE (BioLegend, Cat# 252903), diluted 1:40 in Cell Staining Buffer.

[0734] R11, R12 and 2A2 CAR scFv surface expressions were detected using hROR1-Fc-AF647 (Lyell) diluted 1:50 in Cell Staining Buffer. Transduction Efficiency was determined by surface staining of transduction marker EGFRt using anti-hEGFR-PE (BioLegend, Cat# 252903), diluted 1:40 in Cell Staining Buffer.

### Example 1

### Spacer-Dependent Activity by ROR1 CAR-T Cells

[0735] This study describes the effects of various spacers on inducing autoactivation as well as ROR1-directed cytokine release and potency by T cells expressing R12 CAR. The reference CAR sequence used to test different spacer lengths and its constituent elements is shown in TABLE 20 below.

[0736] Short, intermediate, and long reference spacers were used in the experiments disclosed herein. The “short” reference spacer is an IgG4 hinge-derived spacer of SEQ ID NO: 4911. The “intermediate” reference spacer is an IgG4 hinge-derived spacer of SEQ ID NO:4912. The “long” reference spacer is an IgG4 hinge-derived spacer of SEQ ID NO: 4913.

TABLE 20
R12 Reference CAR sequences

| | |
|---|---|
| SEQ ID NO | Description |

R12 CAR with Short reference spacer CAR against ROR1
SEQ ID NO: 5070

| | |
|---|---|
| 5070 | Full sequence/840aa |
| 4874 | Signal peptide/20aa/aa 1-20 |
| 4875 | scFv/248aa/aa 21-268 |
| 4867 | Spacer/12aa/aa 269-280 |
| 4868 | Transmembrane domain/28aa/aa 281-308 |
| 4869 | 4-1BB costimulatory domain/42aa/aa 309-350 |
| 4870 | CD3z/112aa/aa 351-462 |
| 4871 | P2A/21aa/aa 463-483 |
| 4872 | EGFRt/357aa/aa 484-840 (includes signal peptide set |
| | forth in SEQ ID NO:4865; 22aa/ aa484-505) |

R12 CAR with Short reference spacer CAR against ROR1 with optional
linker SEQ ID NO: 5071

| | |
|---|---|
| 5071 | Full sequence/845aa |
| 4874 | Signal peptide/20aa/aa 1-20 |
| 4875 | scFv/248aa/aa 21-268 |
| 4818 | Optional GGGSG linker/aa 269-273 |
| 4867 | Spacer/12aa/aa 274-285 |
| 4868 | Transmembrane domain/28aa/aa 286-313 |
| 4869 | 4-1BB costimulatory domain/42aa/aa 314-355 |
| 4870 | CD3z/112aa/aa 356-467 |
| 4871 | P2A/21aa/aa 468-488 |
| 4872 | EGFRt/357aa/aa 489-845 |

[0737] Methods: All assays were set up in cytokine-free RPMI1640 media supplemented with 10o FBS (cell-assay media). H1975, Jeko1, Nalm6, Raji, A549, and T47D cell lines were purchased from ATCC. To facilitate target cell imaging via the IncuCyte Live Cell Analysis Imaging System, these cell lines were stably labelled with nuclear mKate2 by lentiviral transduction with IncuCyte NucLight Red Lentivirus Reagent (Sartorius). Area under the curve (AUC) values were calculated by integrating the area under normalized target cell killing curves.

[0738] Expression Constructs: Lentiviral constructs were generated with bi-cistronic expression cassettes. The coding sequences for (i) a ROR1-specific R12 CAR, (ii) a P2A self-cleaving peptide, and (iii) EGFRt (a truncated EGFR having only Domains III and IV and the transmembrane domain; SEQ ID NO:4868) were linked in frame and placed under the control of an MND promoter. The R12 CAR was derived from the R12 anti-ROR1 antibody (Yang et al., PLoS One. (2011) 6:e21018) and contained one of the indicated spacers, a CD28-derived transmembrane domain, a 4-1BB costimulatory domain, and a CD3 zeta signaling domain.

[0739] Estimation of spacer length: When possible, spacer lengths were measured from crystal structures available on the RCSB PDB (Protein Data Bank; http://www.rcsb.org)) using the measurement tool in a molecular visualization software (e.g. PyMOL). Residues with unresolved crystallographic coordinates, consecutive segments of missing density, or spacers for which there are no publicly available crystal structures were each modeled as extended structures with each residue spanning 3.6 Å, the Nᵢ—Nᵢ₊₁ distance in the R conformation.

[0740] Cell Culture and Lentiviral Transduction: Pre-selected, cryopreserved primary human CD4+ and CD8+ T cells from normal donors were obtained from Bloodworks (Seattle WA). Human T cells were cultured in OpTmizer medium (Thermo Fisher) supplemented with Immune Cell Serum Replacement (Thermo Fisher), 2 mM L-glutamine (Gibco), 2 mM Glutamax (Gibco), 200 IU/ml IL-2 (R&D systems), 120 IU/ml IL-7 (R&D systems), and 20 IU/ml IL-15 (R&D systems). For lentiviral transduction, the T cells were stimulated with a 1:100 dilution of T cell TransAct (Miltenyi) for 30 hours. Virus was then added to the T cells for 24 hours. Stimulation and viral infection were then terminated by addition of 7 volumes of fresh media without TransAct, and cells were cultured for 7 additional days in Grex-24 plate (Wilson Wolf) prior to cryopreservation in CryoStor CS10 (STEMCELL Technologies) at 3×10⁷ cells/ml. All freshly thawed T cells were normalized for % CAR+ and total T cells by adding Mock (untransduced) T cells to appropriate samples prior to assay set-up.

[0741] CAR expression measurement via flow cytometry: To measure CAR expression levels and transduction efficiencies, roughly 0.5×10⁶ cells were pelleted after a 6-day production period following lentiviral transduction for flow cytometry analysis. Cells were resuspended in Fixable Viability Dye eFluor 780 (Invitrogen, Cat# 65-0865-14) in PBS for 10 minutes, then washed with Cell Staining Buffer (BioLegend, Cat# 420201).

[0742] R12 CARs scFv surface expression was detected using recombinant human ROR1-Fc chimera protein (R&D, Cat# 9490-RO-050) prelabeled with DyLight™ 650 Microscale Antibody Labeling Kit (ThermoFisher, Cat# 84536) diluted 1:500 in Cell Staining Buffer. Transduction efficiencies were determined by surface staining of transduction marker EGFRt using anti-hEGFR-BV421 (BioLegend, Cat# 352911) diluted 1:40 in Cell Staining Buffer. Cells were pelleted after a 20 minutes incubation in the dark, followed by 2× wash with Cell Staining Buffer. All flow cytometric analysis was done on a ZE5 Cell Analyzer (Biorad) and analyzed with FlowJo (Tree Star).

[0743] Assay set-up—target-independent cytokine secretion: Cryopreserved, transduced primary T cells expressing R12 CAR with indicated spacers were each thawed, counted, and resuspended to a cell density equal to 0.5×10⁶ CAR+ cells/ml in cell-assay media. A 100 μl volume, or 50,000 CAR+ cells, were added to a flat-bottom 96 well plate and incubated in a 37° C. incubator. After 24 hours, supernatant samples from each well was collected for IFNγ measurement according to manufacturer's protocol (Meso Scale Discovery).

[0744] Assay set-up—target-dependent cytokine secretion: Cryopreserved, transduced primary T cells expressing R12 CAR with indicated spacers were each thawed, counted, resuspended to a cell density equal to 0.5×10⁶ CAR+ cells/ml in cell-assay media, and a 100 μl volume, or 50,000 CAR+ cells, were added to a flat-bottom 96 well plate containing 50,000 H1975 cells and incubated at 37° C. in an IncuCyte Live Cell Analysis System (Sartorius). Each well was imaged every 4 hours for quantifying the number of H1975 cells to assess the kinetics of T cell cytotoxicity. After 24 hours, supernatant from each well was collected for IL-2 and IFNγ measurement according to manufacturer's protocol (Meso Scale Discovery). Target cell lysis was tracked over 4 days.

[0745] Assay set-up—serial killing: Cryopreserved, transduced primary T cells expressing R12 CAR with indicated spacers were each thawed, counted, resuspended to a cell density equal to 2×10⁶ CAR+ cells/ml in cell-assay media, and a 1 ml volume, or 0.2×10⁶ CAR+ cells, were added to a 24 well plate containing 0.2×10⁶ Jeko1 cells in 1 ml cell-assay media and incubated at 37C in an IncuCyte Live Cell Analysis System (Sartorius). Each well was imaged every 4 hours for quantifying the number of Jeko1 cells to assess the kinetics of T cell cytotoxicity. At 68 hr and 148 hr time points, 0.5 ml was transferred from the previous co-culture plate to a new 24 well plate containing 0.2×10⁶ fresh Jeko1 cells in 1.5 ml cell-assay media. The numbers of remaining Jeko1 cells over the 3 rounds of co-culture with R12 CART cells were tracked and normalized to the first time point of each round (i.e. 0 hr, 68 hr and 148 hr).

[0746] Results: The results show varying levels of target-independent IFN-γ secretion by the T cells expressing different spacers as a component of the CAR design (FIG. 10). Spacers 20 and 23 in particular induced R12 CART cells to behave in an overtly autoactivating manner, leading to increased levels of IFN-γ detection. The benchmark spacer, ‘Short’, also secreted elevated levels of IFN-γ in the absence of the target antigen, human ROR1. The rest of the indicated spacers exhibited low levels of target-independent activation in R12 CART cells.

[0747] The results also indica

[0748] te varying levels of target-dependent IFN-γ and IL-2 secretion by the T cells expressing different spacers as a component of the CAR design (FIG. 11A). Spacer 1 in particular elicited R12 CART cells to secrete the highest level of IL-2 while spacer 14 in particular caused them to secrete the highest level of IFN-7. In the context of spacer lengths, both IFN-γ and IL-2 output by the T cells were highest when CAR spacer lengths were between 43.2 Å and 75.6 Å (FIG. 11B). The full range of spacer lengths tested using R12 CAR was 43.2 Å ˜248.4 Å.

[0749] The R12 CART with the benchmark spacer, ‘Short’, that also secreted high levels of IFN-γ and IL-2 following exposure to H1975 cells contains a spacer that is 43.2 Å long. The cytokine output by the R12 CART cells correlated with their target lytic capabilities, as measured by their associated AUC values (FIG. 11C).

[0750] The cytokine secretion profile correlated with the prolonged cytotoxic capabilities by the R12 CART cells as five of the spacers (Spacers 1, 11, 13, 14, and Short) that were between 43.2 Å and 75.6 Å in length were able to sustain potent target lytic activities over the 3 rounds of target exposure (FIGS. 12A, 12B, 12C, 12D, and 12E). The full range of spacer lengths tested using R12 CAR was 43.2 Å ˜248.4 Å. The R12 CART with the benchmark spacer, ‘Short’, that also demonstrated sustained cytotoxic activity against Jeko1 cells contained a spacer that was 43.2 Å long.

TABLE 21
Complete ROR1 CAR sequences. The spacer used in each
ROR1 CAR is indicated in
the first column. Spacer numbering follows FIG. 9 numbering.

| | Complete CAR SEQ ID NO | Complete CAR SEQ ID NO |
|---|---|---|
| Spacer | without optional linker | with optional linker |
| 1 | 5072 | 5049 |
| 11 | 5073 | 5065 |
| 13 | 5074 | 5066 |
| 14 | 5075 | 5067 |

TABLE 21A
Components of R12 CAR sequences w/ Spacer 1

| | |
|---|---|
| SEQ ID NO | Description |

R12 CAR with spacer 1 CAR against ROR1

| | |
|---|---|
| 4874 | Signal peptide/20aa |
| 4875 | scFv/248aa |
| 4830 | Spacer 1 |
| 4868 | Transmembrane domain/28aa |
| 4869 | 4-1BB costimulatory domain/42aa |
| 4870 | CD3z/112aa |
| 4871 | P2A/21aa |
| 4872 | EGFRt/357aa (includes 22aa signal peptide set |
| | forth in SEQ ID NO:4865) |

R12 CAR comprising spacer 1 targeting ROR1 (with optional
linker)

| | |
|---|---|
| 4874 | Signal peptide/20aa |
| 4875 | scFv/245aa |
| 4818 | Optional GGGSG linker |
| 4830 | Spacer 1 |
| 4868 | Transmembrane domain/28aa |
| 4869 | 4-1BB costimulatory domain/42aa |
| 4870 | CD3z/112aa |
| 4871 | P2A/21aa |
| 4865 | Signal peptide/22aa |
| 5064 | EGFRt/335 aa |

TABLE 21B
Components of R12 CAR sequences w/ Spacer 2

| | |
|---|---|
| SEQ ID NO | Description |

R12 CAR comprising spacer 2 targeting ROR1

| | |
|---|---|
| 4874 | Signal peptide/20aa |
| 4875 | scFv/248aa |
| 4831 | Spacer 2 |
| 4868 | Transmembrane domain/28aa |
| 4869 | 4-1BB costimulatory domain/42aa |
| 4870 | CD3z/112aa |
| 4871 | P2A/21aa |
| 4865 | Signal peptide/22aa |
| 5064 | EGFRt/335aa |

R12 CAR comprising spacer 2 targeting ROR1 (with optional linker)

| | |
|---|---|
| 4874 | Signal peptide/20aa |
| 4875 | scFv/248aa |
| 4818 | Optional GGGSG linker |
| 4831 | Spacer 2 |
| 4868 | Transmembrane domain/28aa |
| 4869 | 4-1BB costimulatory domain/42aa |
| 4870 | CD3z/112aa |
| 4871 | P2A/ 21aa |
| 4865 | Signal peptide/22aa |
| 5064 | EGFRt/335aa |

TABLE 21C
Components of R12 CAR sequences w/ Spacer 3

| | |
|---|---|
| SEQ ID NO | Description |

R12 CAR comprising spacer 3 targeting ROR1

| | |
|---|---|
| 4874 | Signal peptide/20aa |
| 4875 | scFv/248aa |
| 4832 | Spacer 3 |
| 4868 | Transmembrane domain/28aa |
| 4869 | 4-1BB costimulatory domain/42aa |
| 4870 | CD3z/112aa |
| 4871 | P2A/21aa |
| 4865 | Signal peptide/22aa |
| 5064 | EGFRt/335aa |

R12 CAR comprising spacer 3 targeting ROR1 (with optional linker)

| | |
|---|---|
| 4874 | Signal peptide/20aa |
| 4875 | scFv/248aa |
| 4818 | Optional GGGSG linker |
| 4832 | Spacer 3 |
| 4868 | Transmembrane domain/28aa |
| 4869 | 4-1BB costimulatory domain/42aa |
| 4870 | CD3z/112aa |
| 4871 | P2A/21aa |
| 4865 | Signal peptide/22aa |
| 5064 | EGFRt/335aa |

### Example 2

### Spacer Dependent Activity by CD19 CAR-T Cells

[0751] This study describes the effects of various Ig-derived spacers on inducing CAR-T auto-activation, as well as human CD 19 directed cytokine release and potency. The reference CAR sequence used to test different spacer lengths and its constituent elements is shown in TABLE 22 below. The same experimental methods used in example 1 were used in the present example.

TABLE 22
FMC63 Reference CAR sequences

| | |
|---|---|
| SEQ ID NO | Description |

FMC63 CAR comprising short reference spacer targeting CD19
SEQ ID NO:5076

| | |
|---|---|
| 5076 | Full sequence/837aa |
| 4874 | Signal peptide/20aa/aa 1-20 |
| 4866 | scFv/245aa/aa 21-268 |
| 4876 | Spacer/12aa/aa 266-277 |
| 4877 | Transmembrane domain/28aa/aa 278-305 |
| 4878 | 4-1BB costimulatory domain/42aa/aa 306-347 |
| 4879 | CD3z/112aa/aa 348-459 |
| 4880 | P2A/21aa/aa 460-480 |
| 4865 | Signal peptide/22aa |
| 5064 | EGFRt/335aa/aa 503-837 |

FMC63 CAR components comprising short reference spacer targeting
CD19 (with optional linker)

| | |
|---|---|
| 4874 | Signal peptide/20aa/aa 1-20 |
| 4866 | scFv/245aa/aa 21-265 |
| 5088 | Optional GGGGSG linker |
| 4876 | Spacer/12aa |
| 4877 | Transmembrane domain/28aa |
| 4878 | 4-1BB costimulatory domain/42aa |
| 4879 | CD3z/112aa |
| 4880 | P2A/21aa |
| 4865 | Signal peptide/22aa |
| 4881 | EGFRt/335aa |

[0752] CD 19-specific FMC63 CARs were delivered using lentiviral constructs coding for bi-cistronic expression cassettes. The coding sequences for (i) a CD19-specific FMC63 CAR (ii) a P2A self-cleaving peptide, and (iii) EGFRt (a truncated EGFR having only Domains III and IV and the transmembrane domain; SEQ TD NO:4877) were linked in frame and placed under the control of an MND promoter. The FMC63 CARs were derived from the FMC63 anti-CD19 antibodies and contained one of the indicated spacers, a CD28-derived transmembrane domain, a 4-1 costimulatory domain, and a CD3 zeta signaling domain. Exemplary CAR constructs, e.g., with Spacer 1, Spacer 2, and Spacer 3, are shown below.

TABLE 23
Complete CD19 CAR sequences. The spacer used in each CD19 CAR is indicated in the
first column. Spacer numbering follows FIG. 9 numbering.

| | Complete CAR SEQ ID NO | Complete CAR SEQ ID NO |
|---|---|---|
| Spacer | without optional linker | with optional linker |
| 7 | SEQ ID NO:5077 without optional GGGGSG | 5077 |
| | linker of SEQ ID NO: 5088 before Spacer 7 | |
| 8 | SEQ ID NO:5078 without optional GGGGSG | 5078 |
| | linker of SEQ ID NO: 5088 before Spacer 8 | |
| 9 | SEQ ID NO:5079 without optional GGGGSG | 5079 |
| | linker of SEQ ID NO: 5088 before Spacer 9 | |
| 10 | SEQ ID NO:5080 without optional GGGGSG | 5080 |
| | linker of SEQ ID NO: 5088 before Spacer 10 | |
| 11 | SEQ ID NO:5081 without optional GGGGSG | 5081 |
| | linker of SEQ ID NO: 5088 before Spacer 11 | |
| 14 | SEQ ID NO:5082 without optional GGGGSG | 5082 |
| | linker of SEQ ID NO: 5088 before Spacer 14 | |
| 16 | SEQ ID NO:5083 without optional GGGGSG | 5083 |
| | linker of SEQ ID NO: 5088 before Spacer 16 | |
| 28 | SEQ ID NO:5084 without optional GGGGSG | 5084 |
| | linker of SEQ ID NO: 5088 before Spacer 24 | |

TABLE 23A
Components of FMC63 CAR sequences with Spacer 1

| | |
|---|---|
| SEQ ID NO | Description |

FMC63 CAR comprising spacer 1 targeting CD19

| | |
|---|---|
| 4874 | Signal peptide/20aa |
| 4866 | scFv/245aa |
| 4830 | Spacer 1 |
| 4877 | Transmembrane domain/28aa |
| 4878 | 4-1BB costimulatory domain/42aa |
| 4879 | CD3z/112aa |
| 4880 | P2A/21aa |
| 4865 | Signal peptide/22aa |
| 5064 | EGFRt/335aa |

FMC63 CAR comprising spacer 1 CAR targeting CD19 with optional
linker

| | |
|---|---|
| 4874 | Signal peptide/20aa |
| 4866 | scFv/245aa |
| 5088 | Optional GGGGSG linker |
| 4830 | Spacer 1 |
| 4877 | Transmembrane domain/28aa |
| 4878 | 4-1BB costimulatory domain/42aa |
| 4879 | CD3z/112aa |
| 4880 | P2A/21aa |
| 4865 | Signal peptide/22aa |
| 5064 | EGFRt/335aa |

TABLE 23B
Components of FMC63 CAR sequences with Spacer 2

| | |
|---|---|
| SEQ ID NO | Description |

FMC63 CAR comprising spacer 2 targeting CD19

| | |
|---|---|
| 4874 | Signal peptide/20aa |
| 4866 | scFv/245aa |
| 4831 | Spacer 2 |
| 4877 | Transmembrane domain/28aa |
| 4878 | 4-1BB costimulatory domain/42aa |
| 4879 | CD3z/112aa |
| 4880 | P2A/21aa |
| 4865 | Signal peptide/22aa |
| 5064 | EGFRt/335aa |

FMC63 CAR comprising spacer 2 targeting CD19 with optional
linker

| | |
|---|---|
| 4874 | Signal peptide/20aa |
| 4866 | scFv/245aa |
| 5088 | Optional GGGGSG linker |
| 4831 | Spacer 2 |
| 4877 | Transmembrane domain/28aa |
| 4878 | 4-1BB costimulatory domain/42aa |
| 4879 | CD3z/112aa |
| 4880 | P2A/21aa |
| 4865 | Signal peptide/22aa |
| 5064 | EGFRt/335aa |

TABLE 23C
Components of FMC63 CAR sequences with Spacer 3

| | |
|---|---|
| SEQ ID NO | Description |

FMC63 CAR comprising spacer 3 targeting CD19

| | |
|---|---|
| 4874 | Signal peptide/20aa |
| 4866 | scFv/245aa |
| 4832 | Spacer 3 |
| 4877 | Transmembrane domain/28aa |
| 4878 | 4-1BB costimulatory domain/42aa |
| 4879 | CD3z/112aa |
| 4880 | P2A/21aa |
| 4865 | Signal peptide/22aa |
| 5064 | EGFRt/335aa |

FMC63 CAR comprising spacer 3 targeting CD19 with optional linker

| | |
|---|---|
| 4874 | Signal peptide/20aa |
| 4866 | scFv/245aa |
| 5088 | Optional GGGGSG linker |
| 4832 | Spacer 3 |
| 4877 | Transmembrane domain/28aa |
| 4878 | 4-1BB costimulatory domain/42aa |
| 4879 | CD3z/112aa |
| 4880 | P2A/21aa |
| 4865 | Signal peptide/22aa |
| 5064 | EGFRt/335aa |

[0753] FMC63 CARs scFv surface expression was detected using an anti-ID-AF647 (Lyell) diluted 1:2000 in Cell Staining Buffer. Transduction Efficiency was determined by surface staining of transduction marker EGFRt using anti-hEGFR-BV421 (BioLegend, Cat# 352911) diluted 1:40 in Cell Staining Buffer. Cells were pelleted after a 20 minutes incubation in the dark, followed by 2× wash with Cell Staining Buffer. All flow cytometric analysis was done on a ZE5 Cell Analyzer (Biorad) and analyzed with FlowJo (Tree Star).

[0754] Healthy donor T cells were transduced with lentiviruses encoding FMC63 CARs comprising Ig-derived spacers to a transduction level of between 40% and 80% based on EGFRt staining (FIG. 13A, FIG. 13C), and their CAR expression levels were assessed by staining with an anti-FMC63 antibody conjugated to AlexaFluor647 (FIG. 13B, FIG. 13D). CART cells were challenged with Raji-NLR (FIGS. 13A-D, 14A-E), Nalm6-NLR (FIGS. 15A-E, 16A-E), and Raji_CD19_KO-NLR (FIGS. 18A-E, 19A-E) to determine killing kinetics and target-dependent cytokine production. CART cells were also cultured in the absence of target cells to assess target-independent cytokine production, which is an indicator of autoactivation. Target-independent cytokine secretion was generally low (FIGS. 20A-C, 21A-C). The amount of cytokine production after 24-hr post co-culture correlated with faster killing kinetics, with spacers 7, 8, 9, 10, 11, 14, 16, and 28 performing especially well (FIGS. 22A-B). IFN-γ and IL-2 production were highest when CAR spacer lengths were between 50 Å and 110 Å (FIGS. 23A-D). Similarly, short term cytotoxicity was effective when spacer lengths were between 50 Å and 110 Å (FIGS. 24A-B). We observed that FMC63 CART cells comprising spacers 7, 8, 9, 10, 14, 16, and 28 were able to sustain potent target lytic activities over several rounds of target exposure (FIGS. 25A-D, 26A-D).

### Example 3

### Spacer-Dependent Activity of Her2 CAR-T Cells

[0755] This study describes the effects of various Ig-derived spacers on inducing CAR-T auto-activation, as well as Her2 directed cytokine release and potency. The same experimental methods used in example 1 were used in the present example.

[0756] Anti-Her2-derived CARs were delivered using lentiviral constructs coding for bi-cistronic expression cassettes. The coding sequences for (i) an anti-Her2-derived CAR (ii) a P2A self-cleaving peptide, and (iii) EGFRt (a truncated EGFR having only Domains III and IV and the transmembrane domain) were linked in frame and placed under the control of an MND promoter. The anti-Her2 CARs comprised scFvs derived from the trastuzumab anti-Her2 antibody and contained one of the indicated spacers, a CD28-derived transmembrane domain, a 4-1BB costimulatory domain, and a CD3 zeta signaling domain.

[0757] Anti-Her2 CARs scFv surface expression was detected using Protein L-Biotin (Thermo Scientific, Cat# 29997) diluted 1:6000 in Cell Staining Buffer, followed by Strepavidin-BV421 (BioLegend, Cat# 405226) diluted 1:400 in Cell Staining Buffer. Transduction Efficiency was determined by surface staining of transduction marker EGFRt using anti-hEGFR-PE (BioLegend, Cat# 252903), diluted 1:40 in Cell Staining Buffer.

[0758] Healthy donor T cells were transduced with lentiviruses encoding Anti-Her2 CARs comprising Ig-derived spacers to a transduction level of between 20% and 70% based on EGFRt staining (FIG. 27A, FIG. 27C), and their CAR expression levels were assessed by staining with Protein L-Biotin, followed by Strepavidin-BV421 (FIG. 27B, FIG. 27D). CART cells were challenged with A549-NLR (FIGS. 28A-E, 29A-E), T47D-NLR (FIGS. 30A-E, 31A-E), and T47D-Her2KO-NLR (FIGS. 32A-E, 33A-E) to determine killing kinetics and target-dependent cytokine production. CAR-T cells were also cultured in the absence of target cells to assess target-independent cytokine production, which is an indicator of autoactivation. Target-independent cytokine secretion was generally low (FIGS. 34A-C, 35A-C). The amount of cytokine production after 24-hr post co-culture correlated with faster killing kinetics, with spacers 6, 7, 8, 11, 16, and Intermediate performing especially well (FIGS. 36A-D). IFN-γ and IL-2 production were highest when CAR spacer lengths were between ˜57 Å and ˜122 Å (FIGS. 37A-D). Similarly, short term cytotoxicity was effective when spacer lengths were between ˜57 Å and ˜122 Å (FIGS. 38A-D). We observed that anti-Her2-derived CART cells comprising spacers 6, 7, 8, 16, and Intermediate were best able to sustain target lytic activities over repeated rounds of target exposure (FIGS. 39A-D, FIGS. 40A-D).

TABLE 24
Complete anti-Her2 CAR sequences. The spacer used in each Her2
CAR is indicated in the first column. Spacer numbering
follows FIG. 9 numbering. The scFv linker of SEQ ID NO: 5003,
can be optionally replaced with SEQ ID NO: 5004.

| | Complete CAR SEQ ID NO | Complete CAR SEQ ID NO |
|---|---|---|
| Spacer | Without optional LINKER | With optional linker |
| 6 | 5005 | 5035 |
| 7 | 5006 | 5036 |
| 8 | 5007 | 5037 |
| 16 | 5008 | 5038 |

TABLE 25
Spacers used in Example 4 corresponding FIGS. 44A-77E.

| | Linker | Spacer | Length | | Linker | Spacer | Length |
|---|---|---|---|---|---|---|---|
| Spacer | SEQ | SEQ | (including | Spacer | SEQ | SEQ | (including |
| Identifier | ID NO | ID NO | linker) Å | Identifier | ID NO | ID NO | linker) Å |
| 1 | 4818 | 4830 | 50.4 | 25 | 4818 | 1768 | 86.4 |
| 2 | 4818 | 4831 | 57.6 | 26 | 4818 | 1889 | 79.2 |
| 3 | 4818 | 4832 | 72 | 27 | 4818 | 2015 | 68.4 |
| 4 | 4818 | 4833 | 248.4 | 28 | 4818 | 4856 | 54 |
| 5 | 4818 | 4834 | 205.2 | 29 | 4818 | 4857 | 111.6 |
| 6 | 4818 | 4835 | 187.2 | 30 | 4818 | 4858 | 54 |
| 7 | 4818 | 4836 | 133.2 | 31 | 4818 | 4859 | 61.2 |
| 8 | 4818 | 4837 | 97.2 | 41BB_1 | 4818 | 5009 | 197.6 |
| 9 | 4818 | 4838 | 79.2 | 41BB_2 | 4818 | 5010 | 138.3 |
| 10 | 4818 | 4839 | 79.2 | 41BB_3 | 4818 | 5011 | 106.7 |
| 11 | 4818 | 4840 | 75.6 | CD8a | 4818 | 5012 | 194.4 |
| 13 | 4818 | 4841 | 46.8 | CD27_1 | 4818 | 5013 | 324.4 |
| 14 | 4818 | 4842 | 57.6 | CD27_2 | 4818 | 5014 | 270 |
| 15 | 4818 | 4843 | 43.2 | CD28 | 4818 | 5015 | 158.4 |
| 16 | 4818 | 4844 | 118.8 | Short_nodisulf | 4818 | 5016 | 61.2 |
| 17 | 4818 | 4845 | 54 | Dap10 | 4818 | 5017 | 65.8 |
| 18 | 4818 | 4846 | 54 | GS_short_nodisulf | 4818 | 5018 | 61.2 |
| 19 | 4818 | 4847 | 50.4 | ICOS | 4818 | 5019 | 111.6 |
| 20 | 4818 | 4848 | 72 | OX40 | 4818 | 5020 | 190.8 |
| 21 | 4818 | 4849 | 43.2 | Intermediate | 4818 | 4912 | 104.5 |
| 22 | 4818 | 4850 | 43.2 | Long (CH2CH3) | 4818 | 4913 | 138.9 |
| 23 | 4818 | 4851 | 64.8 | Short (IgG4 Hinge) | 4818 | 4911 | 43.2 |
| 24 | 4818 | 4852 | 295.2 | | | | |

*In some aspects, the optional linker of SEQ ID NO: 4818 can be replaced with a linker of SEQ ID NO: 5088

### Example 4

### Spacer-Dependent Activity of ROR1 CAR-T Cells

[0759] R11 CAR: This study describes the effects of various Ig-derived or extracellular-domain-derived spacers on inducing CAR-T auto-activation, as well as human ROR1 directed cytokine release and potency. ROR1-specific R11 CARs were delivered using lentiviral constructs coding for bi-cistronic expression cassettes. The coding sequences for (i) a ROR1-specific R11 CAR, (ii) a P2A self-cleaving peptide, and (iii) EGFRt (a truncated EGFR having only Domains III and IV and the transmembrane domain; SEQ ID NO:26) were linked in frame and placed under the control of an MND promoter. The R11 CARs were derived from the R11 anti-ROR1 antibody and each comprises one of the indicated spacers, a CD28-derived transmembrane domain, a 4-1BB costimulatory domain, and a CD3 zeta signaling domain.

[0760] The results indicate varying levels of target-dependent IFN-7 and IL-2 secretion by the CAR-T cells expressing R11 CARs having different spacers as a component of the CAR design. Spacers 4 (ELKTPLGDTTHTCPRCPEPKSCDTPPPCPRCPEPKSCDTPPPCPRCPEPKSCDTPPPCPRCPAP; SEQ ID NO: 4833, or GGGGSGELKTPLGDTTHTCPRCPEPKSCDTPPPCPRCPEPKSCDTPPPCPRCPEPKSCDTPPPC PRCPAP; SEQ ID NO: 5039 when including the linker of SEQ ID NO:5088), 5 (CPRCPEPKSCDTPPPCPRCPEPKSCDTPPPCPRCPEPKSCDTPPPCPRCPAP; SEQ ID NO: 4834; or GGGGSGCPRCPEPKSCDTPPPCPRCPEPKSCDTPPPCPRCPEPKSCDTPPPCPRCPAP; SEQ ID NO: 5040 when including the link of SEQ ID NO:5088) and 6 (EPKSCDTPPPCPRCPEPKSCDTPPPCPRCPEPKSCDTPPPCPRCPAP; SEQ ID NO: 4835; or GGGGSGEPKSCDTPPPCPRCPEPKSCDTPPPCPRCPEPKSCDTPPPCPRCPAP; SEQ ID NO: 5041 when including the linker of SEQ ID NO:5088) in particular elicited R11 CAR-T cells to secrete the highest level of cytokines and the highest killing (lowest AUC in IncuCyte kinetic killing curves) in both donors. No tonic signaling was observed in any of the CAR-T cells In the context of spacer lengths, both IFN-7 and IL-2 output by the T cells were highest when CAR spacer lengths ranged from 187-248 Å. See FIGS. 44A-44D, 45A-45C, 46A-46C, 47A-47C, 48A-48B, 49A-49B, 50A-50B, 51, 52, 53A-53B, and 54A-54B.

[0761] R12 CAR: This study describes the effects of various Ig-derived or extracellular-domain-derived spacers on inducing CAR-T auto-activation, as well as human ROR1 directed cytokine release and potency. ROR1-specific R12 CARs were delivered using lentiviral constructs coding for bi-cistronic expression cassettes. The coding sequences for (i) a ROR1-specific R12 CAR, (ii) a P2A self-cleaving peptide, and (iii) EGFRt (a truncated EGFR having only Domains III and IV and the transmembrane domain; SEQ ID NO:26) were linked in frame and placed under the control of an MND promoter. The R12 CARs were derived from the R12 anti-ROR1 antibody and each comprises one of the indicated spacers, a CD28-derived transmembrane domain, a 4-1BB costimulatory domain, and a CD3 zeta signaling domain.

[0762] The results indicate varying levels of target-dependent IFN-7 and IL-2 secretion by the CAR-T cells expressing R12 CARs having different spacers as a component of the CAR design. Spacer 1 (KPCPPCKCP; SEQ ID NO: 4830; or GGGSGKPCPPCKCP; SEQ ID NO: 5042 when including the link of SEQ ID NO:4818), 15 (PPKPKDT; SEQ ID NO: 4843; or GGGSGPPKPKDT; SEQ ID NO: 5043 when including the link of SEQ ID NO:4818) and 21 (VPCPVPP; SEQ ID NO: 4849; or GGGSGVPCPVPP; SEQ ID NO: 5044 when including the link of SEQ ID NO:4818) in particular elicited R12 CAR-T cells to secrete the highest level of cytokines and the highest killing (lowest AUC in IncuCyte kinetic killing curves) in both donors.). No tonic signaling was observed in any of the CAR-T cells. In the context of spacer lengths, both IFN-7 and IL-2 output by the T cells were highest when CAR spacer lengths were approximately 45 Å. See FIGS. 55A-55D, 56A-56C, 57A-57C, 58A-58C, 59A-59B, 60A-60B, 61A-61B, 62, 63, 64A-64B, and 65A-65B.

[0763] 2A2 CAR: This study describes the effects of various Ig-derived or extracellular-domain-derived spacers on inducing CAR-T auto-activation, as well as human ROR1 directed cytokine release and potency. ROR1-specific 2A2 CARs were delivered using lentiviral constructs coding for bi-cistronic expression cassettes. The coding sequences for (i) a ROR1-specific 2A2 CAR, (ii) a P2A self-cleaving peptide, and (iii) EGFRt (a truncated EGFR having only Domains III and IV and the transmembrane domain; SEQ ID NO:26) were linked in frame and placed under the control of an MND promoter. The 2A2 CARs were derived from the 2A2 anti-ROR1 antibody and each comprises one of the indicated spacers, a CD28-derived transmembrane domain, a 4-1BB costimulatory domain, and a CD3 zeta signaling domain.

[0764] The results indicated varying levels of target-dependent IFN-7 and IL-2 secretion by the CAR-T cells expressing different spacers as a component of the CAR design. Spacer 13 (PCPRCPAP; SEQ ID NO: 4841; or GGGGSGPCPRCPAP; SEQ ID NO: 5045 when including the link of SEQ ID NO:5088), 21 (VPCPVPP; SEQ ID NO: 4849; or GGGGSGVPCPVPP; SEQ ID NO: 5044 when including the link of SEQ ID NO:5088) and 28 (SVCSRDFTPP; SEQ ID NO: 4856; or GGGGSGSVCSRDFTPP; SEQ ID NO: 5046 when including the link of SEQ ID NO:5088) in particular elicited 2A2 CAR-T cells to secrete the highest level of cytokines and the highest killing (lowest AUC in IncuCyte kinetic killing curves) in both donors. No tonic signaling was observed in any of the CAR-T cells as shown in FIG. 30 and FIG. 31. In the context of spacer lengths, both IFN-γ and IL-2 output by the T cells were highest when CAR spacer lengths were approximately 45 Å. See FIGS. 66A-66D, 67A-67C, 68A-68C, 69A-69C, 70A-70B, 71A-71B, 72A-72B, 73, 74, 75A-75B, and 76A-76B.

TABLE 26
Sequences of most active CARs identified

| | ROR1 | | |
|---|---|---|---|
| | R11 | R12 | 2A2 |
| Description | SEQ ID NO | SEQ ID NO | SEQ ID NO |
| Signal peptide | 4874 | 4874 | 4874 |
| scFv | 5048 | 4875 | 5047 |
| Gly/Ser linker | 4818 | 5088 | 4818 |
| | Spacer 4833 | 4830 (Spacer 1) | 4841 (Spacer 13) |
| (Spacer 4) | 4834 (Spacer 5) | 4843 (Spacer 15) | 4849 (Spacer 21) |
| | 4835 (Spacer 6) | 4849 (Spacer 21) | 4856 (Spacer 28) |
| Transmembrane | 4868 | 4868 | 4868 |
| domain | | | |
| 4-1BB | 4869 | 4869 | 4869 |
| costimulatory | | | |
| domain | | | |
| CD3z | 4870 | 4870 | 4870 |
| P2A | 4871 | 4871 | 4871 |
| EGFRt including | 4872 | 4872 | 4872 |
| GMCSF signal | | | |
| peptide of SEQ | | | |
| ID NO: 4865 | | | |

### Summary of Examples 1-4

[0765] The results indicated that the optimal spacer differs depending on the binder. Generally, CARs targeted against membrane-proximal epitopes prefer long spacers, and CARs targeted against membrane-distal epitopes prefer short spacers. The optimal spacer lengths for R12, 2 Å2, FMC63, Her and R11 CARs are shown in FIGS. 77A-77E, respectively. Full sequences of the CARs with optimal CAR spacers identified according to the methods disclosed herein are provided in TABLE 27, below. The results have demonstrated that the disclosed collection of spacers have the proper biophysical properties (e.g., shape, flexibility/rigidity) to produce highly active CARs, and the entire collection is useful for empirically determining the optimal spacer for a given CAR/target antigen pair, either my using the disclosed spacers as a screening library, or for rational design based on the dimensions of spacers, binding groups, and antigen position with respect to the signaling synapse (see FIG. 77A-77E).

TABLE 27
Full CAR sequences for CARs targeting ROR1 (CARs comprising R11, R12 and 2A2 binders),
CD19 (CARs comprising FMC63 binder), and Her2 (CARs comprising 4D5 binder).
binders bolded
linkers italicized
spacers underlined
Constituent elements of the CAR can independently be absent or replaced with an
homologous element disclosed herein, known in the art, or a variant or derivative
thereof. For example, a transmembrane domain disclosed herein can be replaced with a
functionally equivalent transmembrane domain. Likewise, one or more of the 4-1BB
costimulatory domain, CD3z domain, P2A domain, or
EGFRt domain can be replaced with a functionally equivalent domain.

| | | |
|---|---|---|
| | Complete | |
| | CAR | |
| | SEQ ID | |
| Spacer | NO | Sequence |

R12 CARs against ROR1

| | | |
|---|---|---|
| 1 | 5049 | MVLQTQVFISLLLWISGAYGQEQLVESGGRLVTPGGSLTLSCKASGEDFSAYYMSWVRQAPGKG |
| | | LEWIATIYPSSGKTYYATWVNGRFTISSDNAQNTVDLQMNSLTAADRATYFCARDSYADDGALF |
| | | NIWGPGTLVTISSGGGGSGGGGSGGGGSELVLTQSPSVSAALGSPAKITCTLSSAHKTDTIDWY |
| | | QQLQGEAPRYLMQVQSDGSYTKRPGVPDRFSGSSSGADRYLIIPSVQADDEADYYCGADYIGGY |
| | | VFGGGTQLTVTGGGGSGKPCPPCKCPMFWVLVVVGGVLACYSLLVTVAFIIFWVKRGRKKLLYI |
| | | FKQPFMRPVQTTQEEDGCSCRFPEEEEGGCELRVKFSRSADAPAYQQGQNQLYNELNLGRREEY |
| | | DVLDKRRGRDPEMGGKPRRKNPQEGLYNELQKDKMAEAYSEIGMKGERRRGKGHDGLYQGLSTA |
| | | TKDTYDALHMQALPPRSGATNFSLLKQAGDVEENPGPMLLLVTSLLLCELPHPAFLLIPRKVCN |
| | | GIGIGEFKDSLSINATNIKHFKNCTSISGDLHILPVAFRGDSFTHTPPLDPQELDILKTVKEIT |
| | | GFLLIQAWPENRTDLHAFENLEIIRGRTKQHGQFSLAVVSLNITSLGLRSLKEISDGDVIISGN |
| | | KNLCYANTINWKKLFGTSGQKTKIISNRGENSCKATGQVCHALCSPEGCWGPEPRDCVSCRNVS |
| | | RGRECVDKCNLLEGEPREFVENSECIQCHPECLPQAMNITCTGRGPDNCIQCAHYIDGPHCVKT |
| | | CPAGVMGENNTLVWKYADAGHVCHLCHPNCTYGCTGPGLEGCPTNGPKIPSIATGMVGALLLLL |
| | | VVALGIGLFM |
| 15 | 5050 | MVLQTQVFISLLLWISGAYGQEQLVESGGRLVTPGGSLTLSCKASGEDFSAYYMSWVRQAPGKG |
| | | LEWIATIYPSSGKTYYATWVNGRFTISSDNAQNTVDLQMNSLTAADRATYFCARDSYADDGALF |
| | | NIWGPGTLVTISSGGGGSGGGGSGGGGSELVLTQSPSVSAALGSPAKITCTLSSAHKTDTIDWY |
| | | QQLQGEAPRYLMQVQSDGSYTKRPGVPDRFSGSSSGADRYLIIPSVQADDEADYYCGADYIGGY |
| | | VFGGGTQLTVTGGGGSGPPKPKDTMFWVLVVVGGVLACYSLLVTVAFIIFWVKRGRKKLLYIFK |
| | | QPFMRPVQTTQEEDGCSCRFPEEEEGGCELRVKFSRSADAPAYQQGQNQLYNELNLGRREEYDV |
| | | LDKRRGRDPEMGGKPRRKNPQEGLYNELQKDKMAEAYSEIGMKGERRRGKGHDGLYQGLSTATK |
| | | DTYDALHMQALPPRSGATNFSLLKQAGDVEENPGPMLLLVTSLLLCELPHPAFLLIPRKVCNGI |
| | | GIGEFKDSLSINATNIKHFKNCTSISGDLHILPVAFRGDSFTHTPPLDPQELDILKTVKEITGF |
| | | LLIQAWPENRTDLHAFENLEIIRGRTKQHGQFSLAVVSLNITSLGLRSLKEISDGDVIISGNKN |
| | | LCYANTINWKKLFGTSGQKTKIISNRGENSCKATGQVCHALCSPEGCWGPEPRDCVSCRNVSRG |
| | | RECVDKCNLLEGEPREFVENSECIQCHPECLPQAMNITCTGRGPDNCIQCAHYIDGPHCVKTCP |
| | | AGVMGENNTLVWKYADAGHVCHLCHPNCTYGCTGPGLEGCPTNGPKIPSIATGMVGALLLLLVV |
| | | ALGIGLFM |
| 21 | 5051 | MVLQTQVFISLLLWISGAYGQEQLVESGGRLVTPGGSLTLSCKASGEDFSAYYMSWVRQAPGKG |
| | | LEWIATIYPSSGKTYYATWVNGRFTISSDNAQNTVDLQMNSLTAADRATYFCARDSYADDGALF |
| | | NIWGPGTLVTISSGGGGSGGGGSGGGGSELVLTQSPSVSAALGSPAKITCTLSSAHKTDTIDWY |
| | | QQLQGEAPRYLMQVQSDGSYTKRPGVPDRFSGSSSGADRYLIIPSVQADDEADYYCGADYIGGY |
| | | VFGGGTQLTVTGGGGSGVPCPVPPMFWVLVVVGGVLACYSLLVTVAFTIFWVKRGRKKLLYIFK |
| | | QPFMRPVQTTQEEDGCSCREPEEEEGGCELRVKFSRSADAPAYQQGQNQLYNELNLGRREEYDV |
| | | LDKRRGRDPEMGGKPRRKNPQEGLYNELQKDKMAEAYSEIGMKGERRRGKGHDGLYQGLSTATK |
| | | DTYDALHMQALPPRSGATNFSLLKQAGDVEENPGPMLLLVTSLLLCELPHPAFLLIPRKVCNGI |
| | | GIGEFKDSLSINATNIKHFKNCTSISGDLHILPVAFRGDSFTHTPPLDPQELDILKTVKEITGF |
| | | LLIQAWPENRTDLHAFENLEIIRGRTKQHGQFSLAVVSLNITSLGLRSLKEISDGDVIISGNKN |
| | | LCYANTINWKKLEGTSGQKTKIISNRGENSCKATGQVCHALCSPEGCWGPEPRDCVSCRNVSRG |
| | | RECVDKCNLLEGEPREFVENSECIQCHPECLPQAMNITCTGRGPDNCIQCAHYIDGPHCVKTCP |
| | | AGVMGENNTLVWKYADAGHVCHLCHPNCTYGCTGPGLEGCPTNGPKIPSIATGMVGALLLLLVV |
| | | ALGIGLFM |

FMC63 CARs against CD19

| | | |
|---|---|---|
| 9 | 5052 | MVLQTQVFISLLLWISGAYGDIQMTQTTSSLSASLGDRVTISCRASQDISKYLNWYQQKPDGTV |
| | | KLLIYHTSRLHSGVPSRFSGSGSGTDYSLTISNLEQEDIATYFCQQGNTLPYTFGGGTKLEITG |
| | | STSGSGKPGSGEGSTKGEVKLQESGPGLVAPSQSLSVTCTVSGVSLPDYGVSWIRQPPRKGLEW |
| | | LGVIWGSETTYYNSALKSRLTIIKDNSKSQVFLKMNSLQTDDTAIYYCAKHYYYGGSYAMDYWG |
| | | QGTSVTVSSGGGGSGEPKSCDTPPPCPRCPAPMFWVLVVVGGVLACYSLLVTVAFTIFWVKRGR |
| | | KKLLYIFKQPFMRPVQTTQEEDGCSCRFPEEEEGGCELRVKFSRSADAPAYQQGQNQLYNELNL |
| | | GRREEYDVLDKRRGRDPEMGGKPRRKNPQEGLYNELQKDKMAEAYSEIGMKGERRRGKGHDGLY |
| | | QGLSTATKDTYDALHMQALPPRSGATNFSLLKQAGDVEENPGPMLLLVTSLLLCELPHPAFLLI |
| | | PRKVCNGIGIGEFKDSLSINATNIKHFKNCTSISGDLHILPVAFRGDSFTHTPPLDPQELDILK |
| | | TVKEITGFLLIQAWPENRTDLHAFENLEIIRGRTKQHGQFSLAVVSLNITSLGLRSLKEISDGD |
| | | VIISGNKNLCYANTINWKKLEGTSGQKTKIISNRGENSCKATGQVCHALCSPEGCWGPEPRDCV |
| | | SCRNVSRGRECVDKCNLLEGEPREFVENSECIQCHPECLPQAMNITCTGRGPDNCIQCAHYIDG |
| | | PHCVKTCPAGVMGENNTLVWKYADAGHVCHLCHPNCTYGCTGPGLEGCPTNGPKIPSIATGMVG |
| | | ALLLLLVVALGIGLFM |
| 10 | 5053 | MVLQTQVFISLLLWISGAYGDIQMTQTTSSLSASLGDRVTISCRASQDISKYLNWYQQKPDGTV |
| | | KLLIYHTSRLHSGVPSRFSGSGSGTDYSLTISNLEQEDIATYFCQQGNTLPYTFGGGTKLEITG |
| | | STSGSGKPGSGEGSTKGEVKLQESGPGLVAPSQSLSVTCTVSGVSLPDYGVSWIRQPPRKGLEW |
| | | LGVIWGSETTYYNSALKSRLTIIKDNSKSQVFLKMNSLQTDDTAIYYCAKHYYYGGSYAMDYWG |
| | | QGTSVTVSSGGGGSGEPKSCDKTHTCPPCPAPMFWVLVVVGGVLACYSLLVTVAFTIFWVKRGR |
| | | KKLLYIFKQPFMRPVQTTQEEDGCSCRFPEEEEGGCELRVKFSRSADAPAYQQGQNQLYNELNL |
| | | GRREEYDVLDKRRGRDPEMGGKPRRKNPQEGLYNELQKDKMAEAYSEIGMKGERRRGKGHDGLY |
| | | QGLSTATKDTYDALHMQALPPRSGATNFSLLKQAGDVEENPGPMLLLVTSLLLCELPHPAFLLI |
| | | PRKVCNGIGIGEFKDSLSINATNIKHFKNCTSISGDLHILPVAFRGDSFTHTPPLDPQELDILK |
| | | TVKEITGFLLIQAWPENRTDLHAFENLEIIRGRTKQHGQFSLAVVSLNITSLGLRSLKEISDGD |
| | | VIISGNKNLCYANTINWKKLEGTSGQKTKIISNRGENSCKATGQVCHALCSPEGCWGPEPRDCV |
| | | SCRNVSRGRECVDKCNLLEGEPREFVENSECIQCHPECLPQAMNITCTGRGPDNCIQCAHYIDG |
| | | PHCVKTCPAGVMGENNTLVWKYADAGHVCHLCHPNCTYGCTGPGLEGCPTNGPKIPSIATGMVG |
| | | ALLLLLVVALGIGLFM |
| 11 | 5054 | MVLQTQVFISLLLWISGAYGDIQMTQTTSSLSASLGDRVTISCRASQDISKYLNWYQQKPDGTV |
| | | KLLIYHTSRLHSGVPSRFSGSGSGTDYSLTISNLEQEDIATYFCQQGNTLPYTFGGGTKLEITG |
| | | STSGSGKPGSGEGSTKGEVKLQESGPGLVAPSQSLSVTCTVSGVSLPDYGVSWIRQPPRKGLEW |
| | | LGVINGSETTYYNSALKSRLTIIKDNSKSQVFLKMNSLQTDDTAIYYCAKHYYYGGSYAMDYWG |
| | | QGTSVTVSSGGGGSGPKSCDKTHTCPPCPAPMFWVLVVVGGVLACYSLLVTVAFTIFWVKRGRK |
| | | KLLYIFKQPFMRPVQTTQEEDGCSCRFPEEEEGGCELRVKFSRSADAPAYQQGQNQLYNELNLG |
| | | RREEYDVLDKRRGRDPEMGGKPRRKNPQEGLYNELQKDKMAEAYSEIGMKGERRRGKGHDGLYQ |
| | | GLSTATKDTYDALHMQALPPRSGATNFSLLKQAGDVEENPGPMLLLVTSLLLCELPHPAFLLIP |
| | | RKVCNGIGIGEFKDSLSINATNIKHFKNCTSISGDLHILPVAFRGDSFTHTPPLDPQELDILKT |
| | | VKEITGFLLIQAWPENRTDLHAFENLEIIRGRTKQHGQFSLAVVSLNITSLGLRSLKEISDGDV |
| | | IISGNKNLCYANTINWKKLEGTSGQKTKIISNRGENSCKATGQVCHALCSPEGCWGPEPRDCVS |
| | | CRNVSRGRECVDKCNLLEGEPREFVENSECIQCHPECLPQAMNITCTGRGPDNCIQCAHYIDGP |
| | | HCVKTCPAGVMGENNTLVWKYADAGHVCHLCHPNCTYGCTGPGLEGCPTNGPKIPSIATGMVGA |
| | | LLLLLVVALGIGLFM |

4D5 CARs against Her2

| | | |
|---|---|---|
| 7 | 5055 | MVLQTQVFISLLLWISGAYGDIQMTQSPSSLSASVGDRVTITCRASQDVNTAVAWYQQKPGKAP |
| | | KLLIYSASFLYSGVPSRFSGSRSGTDFTLTISSLQPEDFATYYCQQHYTTPPTFGQGTKVEIKG |
| | | STSGSGKPGSGEGSGEVQLVESGGGLVQPGGSLRLSCAASGENIKDTYIHWVRQAPGKGLEWVA |
| | | RIYPTNGYTRYADSVKGRFTISADTSKNTAYLQMNSLRAEDTAVYYCSRWGGDGFYAMDYWGQG |
| | | TLVTVSSEPKSCDTPPPCPRCPEPKSCDTPPPCPRCPAPMFWVLVVVGGVLACYSLLVTVAFII |
| | | FWVKRGRKKLLYIFKQPFMRPVQTTQEEDGCSCRFPEEEEGGCELRVKFSRSADAPAYQQGQNQ |
| | | LYNELNLGRREEYDVLDKRRGRDPEMGGKPRRKNPQEGLYNELQKDKMAEAYSEIGMKGERRRG |
| | | KGHDGLYQGLSTATKDTYDALHMQALPPRSGATNESLLKQAGDVEENPGPMLLLVTSLLLCELP |
| | | HPAFLLIPRKVCNGIGIGEFKDSLSINATNIKHFKNCTSISGDLHILPVAFRGDSFTHTPPLDP |
| | | QELDILKTVKEITGFLLIQAWPENRTDLHAFENLEIIRGRTKQHGQFSLAVVSLNITSLGLRSL |
| | | KEISDGDVIISGNKNLCYANTINWKKLEGTSGQKTKIISNRGENSCKATGQVCHALCSPEGCWG |
| | | PEPRDCVSCRNVSRGRECVDKCNLLEGEPREFVENSECIQCHPECLPQAMNITCTGRGPDNCIQ |
| | | CAHYIDGPHCVKTCPAGVMGENNTLVWKYADAGHVCHLCHPNCTYGCTGPGLEGCPTNGPKIPS |
| | | IATGMVGALLLLLVVALGIGLFM |
| 8 | 5056 | MVLQTQVFISLLLWISGAYGDIQMTQSPSSLSASVGDRVTITCRASQDVNTAVAWYQQKPGKAP |
| | | KLLIYSASFLYSGVPSRFSGSRSGTDFTLTISSLQPEDFATYYCQQHYTTPPTFGQGTKVEIKG |
| | | STSGSGKPGSGEGSGEVQLVESGGGLVQPGGSLRLSCAASGENIKDTYIHWVRQAPGKGLEWVA |
| | | RIYPTNGYTRYADSVKGRFTISADTSKNTAYLQMNSLRAEDTAVYYCSRWGGDGFYAMDYWGQG |
| | | TLVTVSSCPRCPEPKSCDTPPPCPRCPAPMFWVLVVVGGVLACYSLLVTVAFTIFWVKRGRKKL |
| | | LYIFKQPFMRPVQTTQEEDGCSCRFPEEEEGGCELRVKFSRSADAPAYQQGQNQLYNELNLGRR |
| | | EEYDVLDKRRGRDPEMGGKPRRKNPQEGLYNELQKDKMAEAYSEIGMKGERRRGKGHDGLYQGL |
| | | STATKDTYDALHMQALPPRSGATNFSLLKQAGDVEENPGPMLLLVTSLLLCELPHPAFLLIPRK |
| | | VCNGIGIGEFKDSLSINATNIKHFKNCTSISGDLHILPVAFRGDSFTHTPPLDPQELDILKTVK |
| | | EITGFLLIQAWPENRTDLHAFENLEIIRGRTKQHGQFSLAVVSLNITSLGLRSLKEISDGDVII |
| | | SGNKNLCYANTINWKKLEGTSGQKTKIISNRGENSCKATGQVCHALCSPEGCWGPEPRDCVSCR |
| | | NVSRGRECVDKCNLLEGEPREFVENSECIQCHPECLPQAMNITCTGRGPDNCIQCAHYIDGPHC |
| | | VKTCPAGVMGENNTLVWKYADAGHVCHLCHPNCTYGCTGPGLEGCPTNGPKIPSIATGMVGALL |
| | | LLLVVALGIGLFM |
| 16 | 5057 | MVLQTQVFISLLLWISGAYGDIQMTQSPSSLSASVGDRVTITCRASQDVNTAVAWYQQKPGKAP |
| | | KLLIYSASFLYSGVPSRFSGSRSGTDFTLTISSLQPEDFATYYCQQHYTTPPTFGQGTKVEIKG |
| | | STSGSGKPGSGEGSGEVQLVESGGGLVQPGGSLRLSCAASGFNIKDTYIHWVRQAPGKGLEWVA |
| | | RIYPTNGYTRYADSVKGRFTISADTSKNTAYLQMNSLRAEDTAVYYCSRWGGDGFYAMDYWGQG |
| | | TLVTVSSTVPCPVPSTPPTPSPSTPPTPSPSCCHPMFWVLVVVGGVLACYSLLVTVAFTIFWVK |
| | | RGRKKLLYIFKQPFMRPVQTTQEEDGCSCRFPEEEEGGCELRVKFSRSADAPAYQQGQNQLYNE |
| | | LNLGRREEYDVLDKRRGRDPEMGGKPRRKNPQEGLYNELQKDKMAEAYSEIGMKGERRRGKGHD |
| | | GLYQGLSTATKDTYDALHMQALPPRSGATNFSLLKQAGDVEENPGPMLLLVTSLLLCELPHPAF |
| | | LLIPRKVCNGIGIGEFKDSLSINATNIKHFKNCTSISGDLHILPVAFRGDSFTHTPPLDPQELD |
| | | ILKTVKEITGFLLIQAWPENRTDLHAFENLEIIRGRTKQHGQFSLAVVSLNITSLGLRSLKEIS |
| | | DGDVIISGNKNLCYANTINWKKLEGTSGQKTKIISNRGENSCKATGQVCHALCSPEGCWGPEPR |
| | | DCVSCRNVSRGRECVDKCNLLEGEPREFVENSECIQCHPECLPQAMNITCTGRGPDNCIQCAHY |
| | | IDGPHCVKTCPAGVMGENNTLVWKYADAGHVCHLCHPNCTYGCTGPGLEGCPTNGPKIPSIATG |
| | | MVGALLLLLVVALGIGLFM |

2A2 CARs against ROR1

| | | |
|---|---|---|
| 13 | 5058 | MVLQTQVFISLLLWISGAYGQVQLQQSGAELVRPGASVTLSCKASGYTFSDYEMHWVIQTPVHG |
| | | LEWIGAIDPETGGTAYNQKFKGKAILTADKSSSTAYMELRSLTSEDSAVYYCTGYYDYDSFTYW |
| | | GQGTLVTVSAGGGGSGGGGSGGGGSDIVMTQSQKIMSTTVGDRVSITCKASQNVDAAVAWYQQK |
| | | PGQSPKLLIYSASNRYTGVPDRFTGSGSGTDFTLTISNMQSEDLADYFCQQYDIYPYTFGGGTK |
| | | LEIKTGGGGSGPCPRCPAPMFWVLVVVGGVLACYSLLVTVAFIIFWVKRGRKKLLYIFKQPFMR |
| | | PVQTTQEEDGCSCRFPEEEEGGCELRVKFSRSADAPAYQQGQNQLYNELNLGRREEYDVLDKRR |
| | | GRDPEMGGKPRRKNPQEGLYNELQKDKMAEAYSEIGMKGERRRGKGHDGLYQGLSTATKDTYDA |
| | | LHMQALPPRSGATNFSLLKQAGDVEENPGPMLLLVTSLLLCELPHPAFLLIPRKVCNGIGIGEF |
| | | KDSLSINATNIKHFKNCTSISGDLHILPVAFRGDSFTHTPPLDPQELDILKTVKEITGFLLIQA |
| | | WPENRTDLHAFENLEIIRGRTKQHGQFSLAVVSLNITSLGLRSLKEISDGDVIISGNKNLCYAN |
| | | TINWKKLFGTSGQKTKIISNRGENSCKATGQVCHALCSPEGCWGPEPRDCVSCRNVSRGRECVD |
| | | KCNLLEGEPREFVENSECIQCHPECLPQAMNITCTGRGPDNCIQCAHYIDGPHCVKTCPAGVMG |
| | | ENNTLVWKYADAGHVCHLCHPNCTYGCTGPGLEGCPTNGPKIPSIATGMVGALLLLLVVALGIG |
| | | LFM |
| 21 | 5059 | MVLQTQVFISLLLWISGAYGQVQLQQSGAELVRPGASVTLSCKASGYTFSDYEMHWVIQTPVHG |
| | | LEWIGAIDPETGGTAYNQKFKGKAILTADKSSSTAYMELRSLTSEDSAVYYCTGYYDYDSFTYW |
| | | GQGTLVTVSAGGGGSGGGGSGGGGSDIVMTQSQKIMSTTVGDRVSITCKASQNVDAAVAWYQQK |
| | | PGQSPKLLIYSASNRYTGVPDRFTGSGSGTDFTLTISNMQSEDLADYFCQQYDIYPYTFGGGTK |
| | | LEIKTGGGGSGVPCPVPPMFWVLVVVGGVLACYSLLVTVAFIIFWVKRGRKKLLYIFKQPFMRP |
| | | VQTTQEEDGCSCRFPEEEEGGCELRVKFSRSADAPAYQQGQNQLYNELNLGRREEYDVLDKRRG |
| | | RDPEMGGKPRRKNPQEGLYNELQKDKMAEAYSEIGMKGERRRGKGHDGLYQGLSTATKDTYDAL |
| | | HMQALPPRSGATNFSLLKQAGDVEENPGPMLLLVTSLLLCELPHPAFLLIPRKVCNGIGIGEFK |
| | | DSLSINATNIKHFKNCTSISGDLHILPVAFRGDSFTHTPPLDPQELDILKTVKEITGFLLIQAW |
| | | PENRTDLHAFENLEIIRGRTKQHGQFSLAVVSLNITSLGLRSLKEISDGDVIISGNKNLCYANT |
| | | INWKKLFGTSGQKTKIISNRGENSCKATGQVCHALCSPEGCWGPEPRDCVSCRNVSRGRECVDK |
| | | CNLLEGEPREFVENSECIQCHPECLPQAMNITCTGRGPDNCIQCAHYIDGPHCVKTCPAGVMGE |
| | | NNTLVWKYADAGHVCHLCHPNCTYGCTGPGLEGCPTNGPKIPSIATGMVGALLLLLVVALGIGL |
| | | FM |
| 28 | 5960 | MVLQTQVFISLLLWISGAYGQVQLQQSGAELVRPGASVTLSCKASGYTFSDYEMHWVIQTPVHG |
| | | LEWIGAIDPETGGTAYNQKFKGKAILTADKSSSTAYMELRSLTSEDSAVYYCTGYYDYDSFTYW |
| | | GQGTLVTVSAGGGGSGGGGSGGGGSDIVMTQSQKIMSTTVGDRVSITCKASQNVDAAVAWYQQK |
| | | PGQSPKLLIYSASNRYTGVPDRFTGSGSGTDFTLTISNMQSEDLADYFCQQYDIYPYTFGGGTK |
| | | LEIKTGGGGSGSVCSRDFTPPMFWVLVVVGGVLACYSLLVTVAFIIFWVKRGRKKLLYIFKQPF |
| | | MRPVQTTQEEDGCSCRFPEEEEGGCELRVKFSRSADAPAYQQGQNQLYNELNLGRREEYDVLDK |
| | | RRGRDPEMGGKPRRKNPQEGLYNELQKDKMAEAYSEIGMKGERRRGKGHDGLYQGLSTATKDTY |
| | | DALHMQALPPRSGATNFSLLKQAGDVEENPGPMLLLVTSLLLCELPHPAFLLIPRKVCNGIGIG |
| | | EFKDSLSINATNIKHFKNCTSISGDLHILPVAFRGDSFTHTPPLDPQELDILKTVKEITGFLLI |
| | | QAWPENRTDLHAFENLEIIRGRTKQHGQFSLAVVSLNITSLGLRSLKEISDGDVIISGNKNLCY |
| | | ANTINWKKLFGTSGQKTKIISNRGENSCKATGQVCHALCSPEGCWGPEPRDCVSCRNVSRGREC |
| | | VDKCNLLEGEPREFVENSECIQCHPECLPQAMNITCTGRGPDNCIQCAHYIDGPHCVKTCPAGV |
| | | MGENNTLVWKYADAGHVCHLCHPNCTYGCTGPGLEGCPTNGPKIPSIATGMVGALLLLLVVALG |
| | | IGLFM |

R11 CARs against ROR1

| | | |
|---|---|---|
| 4 | 5061 | MVLQTQVFISLLLWISGAYGQSVKESEGDLVTPAGNLTLTCTASGSDINDYPISWVRQAPGKGL |
| | | EWIGFINSGGSTWYASWVKGRFTISRTSTTVDLKMTSLTTDDTATYFCARGYSTYYGDFNIWGP |
| | | GTLVTISSGGGGSGGGGSGGGGSELVMTQTPSSTSGAVGGTVTINCQASQSIDSNLAWFQQKPG |
| | | QPPTLLIYRASNLASGVPSRFSGSRSGTEYTLTISGVQREDAATYYCLGGVGNVSYRTSFGGGT |
| | | EVVVKTGGGGSGELKTPLGDTTHTCPRCPEPKSCDTPPPCPRCPEPKSCDTPPPCPRCPEPKSC |
| | | DTPPPCPRCPAPMFWVLVVVGGVLACYSLLVTVAFTIFWVKRGRKKLLYIFKQPFMRPVQTTQE |
| | | EDGCSCRFPEEEEGGCELRVKFSRSADAPAYQQGQNQLYNELNLGRREEYDVLDKRRGRDPEMG |
| | | GKPRRKNPQEGLYNELQKDKMAEAYSEIGMKGERRRGKGHDGLYQGLSTATKDTYDALHMQALP |
| | | PRSGATNFSLLKQAGDVEENPGPMLLLVTSLLLCELPHPAFLLIPRKVCNGIGIGEFKDSLSIN |
| | | ATNIKHFKNCTSISGDLHILPVAFRGDSFTHTPPLDPQELDILKTVKEITGFLLIQAWPENRTD |
| | | LHAFENLEIIRGRTKQHGQFSLAVVSLNITSLGLRSLKEISDGDVIISGNKNLCYANTINWKKL |
| | | FGTSGQKTKIISNRGENSCKATGQVCHALCSPEGCWGPEPRDCVSCRNVSRGRECVDKCNLLEG |
| | | EPREFVENSECIQCHPECLPQAMNITCTGRGPDNCIQCAHYIDGPHCVKTCPAGVMGENNTLVW |
| | | KYADAGHVCHLCHPNCTYGCTGPGLEGCPTNGPKIPSIATGMVGALLLLLVVALGIGLFM |
| 5 | 5062 | MVLQTQVFISLLLWISGAYGQSVKESEGDLVTPAGNLTLTCTASGSDINDYPISWVRQAPGKGL |
| | | EWIGFINSGGSTWYASWVKGRFTISRTSTTVDLKMTSLTTDDTATYFCARGYSTYYGDFNIWGP |
| | | GTLVTISSGGGGSGGGGSGGGGSELVMTQTPSSTSGAVGGTVTINCQASQSIDSNLAWFQQKPG |
| | | QPPTLLIYRASNLASGVPSRFSGSRSGTEYTLTISGVQREDAATYYCLGGVGNVSYRTSFGGGT |
| | | EVVVKTGGGGSGCPRCPEPKSCDTPPPCPRCPEPKSCDTPPPCPRCPEPKSCDTPPPCPRCPAP |
| | | MFWVLVVVGGVLACYSLLVTVAFTIFWVKRGRKKLLYIFKQPFMRPVQTTQEEDGCSCRFPEEE |
| | | EGGCELRVKFSRSADAPAYQQGQNQLYNELNLGRREEYDVLDKRRGRDPEMGGKPRRKNPQEGL |
| | | YNELQKDKMAEAYSEIGMKGERRRGKGHDGLYQGLSTATKDTYDALHMQALPPRSGATNFSLLK |
| | | QAGDVEENPGPMLLLVTSLLLCELPHPAFLLIPRKVCNGIGIGEFKDSLSINATNIKHFKNCTS |
| | | ISGDLHILPVAFRGDSFTHTPPLDPQELDILKTVKEITGFLLIQAWPENRTDLHAFENLEIIRG |
| | | RTKQHGQFSLAVVSLNITSLGLRSLKEISDGDVIISGNKNLCYANTINWKKLFGTSGQKTKIIS |
| | | NRGENSCKATGQVCHALCSPEGCWGPEPRDCVSCRNVSRGRECVDKCNLLEGEPREFVENSECI |
| | | QCHPECLPQAMNITCTGRGPDNCIQCAHYIDGPHCVKTCPAGVMGENNTLVWKYADAGHVCHLC |
| | | HPNCTYGCTGPGLEGCPTNGPKIPSIATGMVGALLLLLVVALGIGLFM |
| 6 | 5063 | MVLQTQVFISLLLWISGAYGQSVKESEGDLVTPAGNLTLTCTASGSDINDYPISWVRQAPGKGL |
| | | EWIGFINSGGSTWYASWVKGRFTISRTSTTVDLKMTSLTTDDTATYFCARGYSTYYGDFNIWGP |
| | | GTLVTISSGGGGSGGGGSGGGGSELVMTQTPSSTSGAVGGTVTINCQASQSIDSNLAWFQQKPG |
| | | QPPTLLIYRASNLASGVPSRFSGSRSGTEYTLTISGVQREDAATYYCLGGVGNVSYRTSFGGGT |
| | | EVVVKTGGGGSGEPKSCDTPPPCPRCPEPKSCDTPPPCPRCPEPKSCDTPPPCPRCPAPMFWVL |
| | | VVVGGVLACYSLLVTVAFIIFWVKRGRKKLLYIFKQPFMRPVQTTQEEDGCSCRFPEEEEGGCE |
| | | LRVKFSRSADAPAYQQGQNQLYNELNLGRREEYDVLDKRRGRDPEMGGKPRRKNPQEGLYNELQ |
| | | KDKMAEAYSEIGMKGERRRGKGHDGLYQGLSTATKDTYDALHMQALPPRSGATNESLLKQAGDV |
| | | EENPGPMLLLVTSLLLCELPHPAELLIPRKVCNGIGIGEFKDSLSINATNIKHEKNCTSISGDL |
| | | HILPVAFRGDSFTHTPPLDPQELDILKTVKEITGFLLIQAWPENRTDLHAFENLETIRGRTKQH |
| | | GQFSLAVVSLNITSLGLRSLKEISDGDVIISGNKNLCYANTINWKKLFGTSGQKTKIISNRGEN |
| | | SCKATGQVCHALCSPEGCWGPEPRDCVSCRNVSRGRECVDKCNLLEGEPREFVENSECTQCHPE |
| | | CLPQAMNITCTGRGPDNCIQCAHYIDGPHCVKTCPAGVMGENNTLVWKYADAGHVCHLCHPNCT |
| | | YGCTGPGLEGCPTNGPKIPSIATGMVGALLLLLVVALGIGLFM |

TABLE 28
Summary of properties of selected CARs

| | | | Spacer | Nalm6 | Raji | | | |
|---|---|---|---|---|---|---|---|---|
| | | | Length with | normalized | normalized | Nalm6 | Nalm6 | Raji |
| Binder | Donor | Spacer | Linker (Å) | AUC | AUC | IFNg | IL-2 | IFNg |
| FMC63 | 3868 | 9 | 79.2 | 14.9 | 19.1 | 62067 | 68 | 142559 |
| FMC63 | 3868 | 10 | 79.2 | 14.2 | 18.3 | 65929 | 41 | 158893 |
| FMC63 | 3868 | 11 | 75.6 | 13.2 | 17.9 | 53252 | 23 | 146062 |
| FMC63 | 4869 | 9 | 79.2 | 14.3 | 49.5 | 53816 | 945 | 100333 |
| FMC63 | 4869 | 10 | 79.2 | 15.5 | 45.4 | 72105 | 517 | 139572 |
| FMC63 | 4869 | 11 | 75.6 | 12.2 | 46.2 | 54543 | 211 | 114046 |
| | | | | A549 | T47D | | | |
| | | | Spacer | normalized | normalized | A549 | A549 | T47D |
| Binder | Donor | Spacer | Length (Å) | AUC | AUC | IFNg | IL-2 | IFNg |
| Herceptin* | 15842 | 7 | 115.2 | 61.3 | 44.2 | 163107 | 267 | 162769 |
| Herceptin* | 15842 | 8 | 79.2 | 66.1 | 46.1 | 120256 | 128 | 167636 |
| Herceptin* | 15842 | 16 | 100.8 | 62.0 | 50.3 | 125690 | 157 | 163484 |
| Herceptin* | 13814 | 7 | 115.2 | 61.9 | 43.5 | 104083 | 138 | 130715 |
| Herceptin* | 13814 | 8 | 79.2 | 64.5 | 41.3 | 94188 | 194 | 154415 |
| Herceptin* | 13814 | 16 | 100.8 | 60.6 | 35.8 | 95916 | 178 | 166721 |
| | | | Spacer | A549 | H1975 | | | |
| | | | Length with | normalized | normalized | A549 | A549 | H1975 |
| Binder | Donor | Spacer | Linker (Å) | AUC | AUC | IFNg | IL-2 | IFNg |
| R12 | 2735 | 1 | 50.4 | 67.6 | 67.6 | 8935 | 4 | 15716 |
| R12 | 2735 | 15 | 43.2 | 64.0 | 63.0 | 13752 | 8 | 16921 |
| R12 | 2735 | 21 | 43.2 | 66.3 | 61.5 | 14082 | 7 | 23225 |
| R12 | 5018 | 1 | 50.4 | 80.9 | 68.8 | 4349 | 0 | 4846 |
| R12 | 5018 | 15 | 43.2 | 81.2 | 75.0 | 7613 | 9 | 4315 |
| | | | Spacer | Nalm6 | Raji | | | |
| | | | Length with | normalized | normalized | Nalm6 | Nalm6 | Raji |
| Binder | Donor | Spacer | Linker (Å) | AUC | AUC | IFNg | IL-2 | IFNg |
| R12 | 5018 | 21 | 43.2 | 85.0 | 77.4 | 5001 | 8 | 2651 |
| R11 | 7811 | 4 | 248.4 | 54.6 | 83.1 | 46161 | 26 | 15901 |
| R11 | 7811 | 5 | 205.2 | 48.8 | 69.6 | 83558 | 87 | 32411 |
| R11 | 7811 | 6 | 187.2 | 51.4 | 96.5 | 86709 | 89 | 11873 |
| R11 | 5018 | 4 | 248.4 | 59.1 | 94.5 | 37008 | 5 | 9128 |
| R11 | 5018 | 5 | 205.2 | 55.8 | 86.7 | 60935 | 10 | 17320 |
| R11 | 5018 | 6 | 187.2 | 58.4 | 114.2 | 46294 | 10 | 7174 |
| 2A2 | 2089 | 13 | 46.8 | 42.0 | 37.9 | 46579 | 1 | 67057 |
| 2A2 | 2089 | 21 | 43.2 | 38.0 | 39.4 | 55445 | 1 | 78043 |
| 2A2 | 2089 | 28 | 54 | 43.6 | 39.5 | 49905 | 1 | 78267 |
| 2A2 | 5018 | 13 | 46.8 | 61.0 | 43.2 | 38935 | 3 | 54335 |
| 2A2 | 5018 | 21 | 43.2 | 58.9 | 43.2 | 41252 | 3 | 61898 |
| 2A2 | 5018 | 28 | 54 | 61.0 | 44.3 | 34242 | 2 | 58088 |
| | | | | | Raji CD19 | Raji | | |
| | | | Spacer | | KO | CD19 | Raji | No |
| | | | Length with | | normalized | KO | CD19 | Target |
| Binder | Donor | Spacer | Linker (Å) | Raji IL-2 | AUC | IFNg | KO IL-2 | IFNg |
| FMC63 | 3868 | 9 | 79.2 | 3216 | 238307 | 4480 | 17 | 1211 |
| FMC63 | 3868 | 10 | 79.2 | 5497 | 247388 | 4745 | 12 | 1649 |
| FMC63 | 3868 | 11 | 75.6 | 3372 | 245963 | 3667 | 9 | 1853 |
| FMC63 | 4869 | 9 | 79.2 | 10092 | 223873 | 3501 | 32 | 556 |
| FMC63 | 4869 | 10 | 79.2 | 13465 | 199757 | 6382 | 41 | 2984 |
| FMC63 | 4869 | 11 | 75.6 | 9042 | 240626 | 3048 | 18 | 638 |
| | | | | | T47D Her2 | T47D | | |
| | | | | | KO | Her2 | T47D | No |
| | | | Spacer | | normalized | KO | Her2 KO | Target |
| Binder | Donor | Spacer | Length (Å) | T47D IL-2 | AUC | IFNg | IL-2 | IFNg |
| Herceptin* | 15842 | 7 | 115.2 | 857 | 509961 | 2632 | 2 | 1830 |
| Herceptin* | 15842 | 8 | 79.2 | 1525 | 563903 | 2532 | 1 | 1764 |
| Herceptin* | 15842 | 16 | 100.8 | 1147 | 713877 | 2470 | 1 | 1674 |
| Herceptin* | 13814 | 7 | 115.2 | 731 | 827793 | 1619 | 1 | 1331 |
| Herceptin* | 13814 | 8 | 79.2 | 1459 | 823493 | 1533 | 1 | 1415 |
| Herceptin* | 13814 | 16 | 100.8 | 984 | 804135 | 2581 | 0 | 2024 |
| | | | | | Raji CD19 | Raji | | |
| | | | Spacer | | KO | CD19 | Raji | No |
| | | | Length with | | normalized | KO | CD19 | Target |
| Binder | Donor | Spacer | Linker (Å) | Raji IL-2 | AUC | IFNg | KO IL-2 | IFNg |
| | | | | | A549 | A549 | | |
| | | | Spacer | | ROR1 KO | ROR1 | A549 | No |
| | | | Length with | | normalized | KO | ROR1 | Target |
| Binder | Donor | Spacer | Linker (Å) | H1975 IL-2 | AUC | IFNg | KO IL-2 | IFNg |
| R12 | 2735 | 1 | 50.4 | 10 | 283488 | 995 | 0 | 419 |
| R12 | 2735 | 15 | 43.2 | 17 | 262223 | 1353 | 3 | 415 |
| R12 | 2735 | 21 | 43.2 | 26 | 264326 | 1391 | 0 | 478 |
| R12 | 5018 | 1 | 50.4 | 0 | 275978 | 465 | 1 | 1051 |
| R12 | 5018 | 15 | 43.2 | 10 | 299606 | 1528 | 1 | 2004 |
| R12 | 5018 | 21 | 43.2 | 7 | 301079 | 1257 | 1 | 2157 |
| R11 | 7811 | 4 | 248.4 | 4 | 275413 | 3778 | 2 | 2437 |
| R11 | 7811 | 5 | 205.2 | 16 | 238046 | 6430 | 3 | 3317 |
| R11 | 7811 | 6 | 187.2 | 2 | 256889 | 5902 | 2 | 3292 |
| R11 | 5018 | 4 | 248.4 | 1 | 301271 | 3221 | 1 | 2744 |
| R11 | 5018 | 5 | 205.2 | 2 | 279139 | 5458 | 1 | 3391 |
| R11 | 5018 | 6 | 187.2 | 1 | 297120 | 5353 | 1 | 3814 |
| 2A2 | 2089 | 13 | 46.8 | 1 | 161899 | 13199 | 1 | 15196 |
| 2A2 | 2089 | 21 | 43.2 | 2 | 175504 | 16360 | 1 | 19127 |
| 2A2 | 2089 | 28 | 54 | 1 | 168503 | 19835 | 1 | 22465 |
| 2A2 | 5018 | 13 | 46.8 | 14 | 225124 | 4030 | 0 | 4824 |
| 2A2 | 5018 | 21 | 43.2 | 13 | 233789 | 5220 | 0 | 6602 |
| 2A2 | 5018 | 28 | 54 | 8 | 215509 | 5721 | 1 | 6763 |

*Her2 spacer length calculations do not include the GGGSG linker of SEQ ID NO: 4818

### Example 5

### In Vivo Anti-Tumor Activity of R12 CARs

[0766] Methods: NCI-H1975 tumor cells were implanted into mice with a take rate of 100%. Animals were randomized into treatment groups of 5 animals 11 days post tumor implantation based on tumor volume with a mean tumor size of 101.91 mm3+/−1.24 mm3. All groups received appropriate intravenous T cell treatment on day 12. Tumor measurements were collected by caliper and body weights collected by digital scale 2 times per week. Blood was collected for PK analysis via the submental region 24 hours post T cell dose, and weekly thereafter for 5 weeks total. Animals were euthanized when tumors reached 2000 mm3 in size, body weight loss exceeded 20% or were moribund.

[0767] Results: The study was successfully conducted and demonstrated that R12-1 (CAR comprising Spacer 1; SEQ ID NO: 5049) had the highest anti-tumor activity of all products tested, shown by lowest tumor volumes, extended survival, and a marked increase in peripheral CAR+ T cell counts (for both CD4+ and CD8+ T cells) by day 14 at both dose levels (see FIGS. 82A to 85L; PK graphs show mean +/−standard error of the mean of all animals alive at the time of sampling). R12-IgG4 (CAR with “Short” reference spacer of SEQ ID NO: 4911) was the second strongest CAR T cell product, also extending survival but without expansion of T cells in the blood. A single animal in the R12-CD8a (CAR with CD8a spacer) group had a delayed but strong anti-tumor response which coincided with strong expansion of CAR T cells into the blood at day 28. No other animal in that group had an anti-tumor response and thus the R12-CD8a group is considered not efficacious. R12-5 (CAR comprising Spacer 5) and R12-16 (CAR comprising Spacer 16) products did not show significant anti-tumor activity at any dose level tested. See FIG. 78A to FIG. 85L.

[0768] It is to be appreciated that the Detailed Description section, and not the Summary and Abstract sections, is intended to be used to interpret the claims. The Summary and Abstract sections may set forth one or more but not all exemplary embodiments of the present disclosure as contemplated by the inventor(s), and thus, are not intended to limit the present disclosure and the appended claims in any way.

[0769] The present disclosure has been described above with the aid of functional building blocks illustrating the implementation of specified functions and relationships thereof. The boundaries of these functional building blocks have been arbitrarily defined herein for the convenience of the description. Alternate boundaries can be defined so long as the specified functions and relationships thereof are appropriately performed.

[0770] The foregoing description of the specific embodiments will so fully reveal the general nature of the disclosure that others can, by applying knowledge within the skill of the art, readily modify and/or adapt for various applications such specific embodiments, without undue experimentation, without departing from the general concept of the present disclosure. Therefore, such adaptations and modifications are intended to be within the meaning and range of equivalents of the disclosed embodiments, based on the teaching and guidance presented herein. It is to be understood that the phraseology or terminology herein is for the purpose of description and not of limitation, such that the terminology or phraseology of the present specification is to be interpreted by the skilled artisan in light of the teachings and guidance.

[0771] The breadth and scope of the present disclosure should not be limited by any of the above-described exemplary embodiments, but should be defined only in accordance with the following claims and their equivalents.

[0772] The contents of all cited references (including literature references, patents, patent applications, and websites) that may be cited throughout this application are hereby expressly incorporated by reference in their entirety for any purpose, as are the references cited therein.

The application's sequence listing, which the Patent Office published only in electronic form, follows.

SEQUENCE LISTING (5088 sequences)

SEQ ID NO: 1 - protein, 77 aa, synthetic construct
  REGION 1..77: note = Synthetic Peptide
RWPESPKAQASSVPTAQPQAEGSLAKATTAPATTRNTGRGGEEKKKEKEKEEQEERETKTPECPSHTQPLGVYLLTP

SEQ ID NO: 2 - protein, 76 aa, synthetic construct
  REGION 1..76: note = Synthetic Peptide
WPESPKAQASSVPTAQPQAEGSLAKATTAPATTRNTGRGGEEKKKEKEKEEQEERETKTPECPSHTQPLGVYLLTP

SEQ ID NO: 3 - protein, 76 aa, synthetic construct
  REGION 1..76: note = Synthetic Peptide
RWPESPKAQASSVPTAQPQAEGSLAKATTAPATTRNTGRGGEEKKKEKEKEEQEERETKTPECPSHTQPLGVYLLT

SEQ ID NO: 4 - protein, 75 aa, synthetic construct
  REGION 1..75: note = Synthetic Peptide
PESPKAQASSVPTAQPQAEGSLAKATTAPATTRNTGRGGEEKKKEKEKEEQEERETKTPECPSHTQPLGVYLLTP

SEQ ID NO: 5 - protein, 75 aa, synthetic construct
  REGION 1..75: note = Synthetic Peptide
RWPESPKAQASSVPTAQPQAEGSLAKATTAPATTRNTGRGGEEKKKEKEKEEQEERETKTPECPSHTQPLGVYLL

SEQ ID NO: 6 - protein, 75 aa, synthetic construct
  REGION 1..75: note = Synthetic Peptide
WPESPKAQASSVPTAQPQAEGSLAKATTAPATTRNTGRGGEEKKKEKEKEEQEERETKTPECPSHTQPLGVYLLT

SEQ ID NO: 7 - protein, 74 aa, synthetic construct
  REGION 1..74: note = Synthetic Peptide
ESPKAQASSVPTAQPQAEGSLAKATTAPATTRNTGRGGEEKKKEKEKEEQEERETKTPECPSHTQPLGVYLLTP

SEQ ID NO: 8 - protein, 74 aa, synthetic construct
  REGION 1..74: note = Synthetic Peptide
PESPKAQASSVPTAQPQAEGSLAKATTAPATTRNTGRGGEEKKKEKEKEEQEERETKTPECPSHTQPLGVYLLT

SEQ ID NO: 9 - protein, 74 aa, synthetic construct
  REGION 1..74: note = Synthetic Peptide
WPESPKAQASSVPTAQPQAEGSLAKATTAPATTRNTGRGGEEKKKEKEKEEQEERETKTPECPSHTQPLGVYLL

SEQ ID NO: 10 - protein, 74 aa, synthetic construct
  REGION 1..74: note = Synthetic Peptide
RWPESPKAQASSVPTAQPQAEGSLAKATTAPATTRNTGRGGEEKKKEKEKEEQEERETKTPECPSHTQPLGVYL

SEQ ID NO: 11 - protein, 73 aa, synthetic construct
  REGION 1..73: note = Synthetic Peptide
SPKAQASSVPTAQPQAEGSLAKATTAPATTRNTGRGGEEKKKEKEKEEQEERETKTPECPSHTQPLGVYLLTP

SEQ ID NO: 12 - protein, 73 aa, synthetic construct
  REGION 1..73: note = Synthetic Peptide
ESPKAQASSVPTAQPQAEGSLAKATTAPATTRNTGRGGEEKKKEKEKEEQEERETKTPECPSHTQPLGVYLLT

SEQ ID NO: 13 - protein, 73 aa, synthetic construct
  REGION 1..73: note = Synthetic Peptide
PESPKAQASSVPTAQPQAEGSLAKATTAPATTRNTGRGGEEKKKEKEKEEQEERETKTPECPSHTQPLGVYLL

SEQ ID NO: 14 - protein, 73 aa, synthetic construct
  REGION 1..73: note = Synthetic Peptide
WPESPKAQASSVPTAQPQAEGSLAKATTAPATTRNTGRGGEEKKKEKEKEEQEERETKTPECPSHTQPLGVYL

SEQ ID NO: 15 - protein, 73 aa, synthetic construct
  REGION 1..73: note = Synthetic Peptide
RWPESPKAQASSVPTAQPQAEGSLAKATTAPATTRNTGRGGEEKKKEKEKEEQEERETKTPECPSHTQPLGVY

SEQ ID NO: 16 - protein, 72 aa, synthetic construct
  REGION 1..72: note = Synthetic Peptide
PKAQASSVPTAQPQAEGSLAKATTAPATTRNTGRGGEEKKKEKEKEEQEERETKTPECPSHTQPLGVYLLTP

SEQ ID NO: 17 - protein, 72 aa, synthetic construct
  REGION 1..72: note = Synthetic Peptide
SPKAQASSVPTAQPQAEGSLAKATTAPATTRNTGRGGEEKKKEKEKEEQEERETKTPECPSHTQPLGVYLLT

SEQ ID NO: 18 - protein, 72 aa, synthetic construct
  REGION 1..72: note = Synthetic Peptide
ESPKAQASSVPTAQPQAEGSLAKATTAPATTRNTGRGGEEKKKEKEKEEQEERETKTPECPSHTQPLGVYLL

SEQ ID NO: 19 - protein, 72 aa, synthetic construct
  REGION 1..72: note = Synthetic Peptide
PESPKAQASSVPTAQPQAEGSLAKATTAPATTRNTGRGGEEKKKEKEKEEQEERETKTPECPSHTQPLGVYL

SEQ ID NO: 20 - protein, 72 aa, synthetic construct
  REGION 1..72: note = Synthetic Peptide
WPESPKAQASSVPTAQPQAEGSLAKATTAPATTRNTGRGGEEKKKEKEKEEQEERETKTPECPSHTQPLGVY

SEQ ID NO: 21 - protein, 72 aa, synthetic construct
  REGION 1..72: note = Synthetic Peptide
RWPESPKAQASSVPTAQPQAEGSLAKATTAPATTRNTGRGGEEKKKEKEKEEQEERETKTPECPSHTQPLGV

SEQ ID NO: 22 - protein, 71 aa, synthetic construct
  REGION 1..71: note = Synthetic Peptide
KAQASSVPTAQPQAEGSLAKATTAPATTRNTGRGGEEKKKEKEKEEQEERETKTPECPSHTQPLGVYLLTP

SEQ ID NO: 23 - protein, 71 aa, synthetic construct
  REGION 1..71: note = Synthetic Peptide
PKAQASSVPTAQPQAEGSLAKATTAPATTRNTGRGGEEKKKEKEKEEQEERETKTPECPSHTQPLGVYLLT

SEQ ID NO: 24 - protein, 71 aa, synthetic construct
  REGION 1..71: note = Synthetic Peptide
SPKAQASSVPTAQPQAEGSLAKATTAPATTRNTGRGGEEKKKEKEKEEQEERETKTPECPSHTQPLGVYLL

SEQ ID NO: 25 - protein, 71 aa, synthetic construct
  REGION 1..71: note = Synthetic Peptide
ESPKAQASSVPTAQPQAEGSLAKATTAPATTRNTGRGGEEKKKEKEKEEQEERETKTPECPSHTQPLGVYL

SEQ ID NO: 26 - protein, 71 aa, synthetic construct
  REGION 1..71: note = Synthetic Peptide
PESPKAQASSVPTAQPQAEGSLAKATTAPATTRNTGRGGEEKKKEKEKEEQEERETKTPECPSHTQPLGVY

SEQ ID NO: 27 - protein, 71 aa, synthetic construct
  REGION 1..71: note = Synthetic Peptide
WPESPKAQASSVPTAQPQAEGSLAKATTAPATTRNTGRGGEEKKKEKEKEEQEERETKTPECPSHTQPLGV

SEQ ID NO: 28 - protein, 71 aa, synthetic construct
  REGION 1..71: note = Synthetic Peptide
RWPESPKAQASSVPTAQPQAEGSLAKATTAPATTRNTGRGGEEKKKEKEKEEQEERETKTPECPSHTQPLG

SEQ ID NO: 29 - protein, 70 aa, synthetic construct
  REGION 1..70: note = Synthetic Peptide
AQASSVPTAQPQAEGSLAKATTAPATTRNTGRGGEEKKKEKEKEEQEERETKTPECPSHTQPLGVYLLTP

SEQ ID NO: 30 - protein, 70 aa, synthetic construct
  REGION 1..70: note = Synthetic Peptide
KAQASSVPTAQPQAEGSLAKATTAPATTRNTGRGGEEKKKEKEKEEQEERETKTPECPSHTQPLGVYLLT

SEQ ID NO: 31 - protein, 70 aa, synthetic construct
  REGION 1..70: note = Synthetic Peptide
PKAQASSVPTAQPQAEGSLAKATTAPATTRNTGRGGEEKKKEKEKEEQEERETKTPECPSHTQPLGVYLL

SEQ ID NO: 32 - protein, 70 aa, synthetic construct
  REGION 1..70: note = Synthetic Peptide
SPKAQASSVPTAQPQAEGSLAKATTAPATTRNTGRGGEEKKKEKEKEEQEERETKTPECPSHTQPLGVYL

SEQ ID NO: 33 - protein, 70 aa, synthetic construct
  REGION 1..70: note = Synthetic Peptide
ESPKAQASSVPTAQPQAEGSLAKATTAPATTRNTGRGGEEKKKEKEKEEQEERETKTPECPSHTQPLGVY

SEQ ID NO: 34 - protein, 70 aa, synthetic construct
  REGION 1..70: note = Synthetic Peptide
PESPKAQASSVPTAQPQAEGSLAKATTAPATTRNTGRGGEEKKKEKEKEEQEERETKTPECPSHTQPLGV

SEQ ID NO: 35 - protein, 70 aa, synthetic construct
  REGION 1..70: note = Synthetic Peptide
WPESPKAQASSVPTAQPQAEGSLAKATTAPATTRNTGRGGEEKKKEKEKEEQEERETKTPECPSHTQPLG

SEQ ID NO: 36 - protein, 70 aa, synthetic construct
  REGION 1..70: note = Synthetic Peptide
RWPESPKAQASSVPTAQPQAEGSLAKATTAPATTRNTGRGGEEKKKEKEKEEQEERETKTPECPSHTQPL

SEQ ID NO: 37 - protein, 69 aa, synthetic construct
  REGION 1..69: note = Synthetic Peptide
QASSVPTAQPQAEGSLAKATTAPATTRNTGRGGEEKKKEKEKEEQEERETKTPECPSHTQPLGVYLLTP

SEQ ID NO: 38 - protein, 69 aa, synthetic construct
  REGION 1..69: note = Synthetic Peptide
AQASSVPTAQPQAEGSLAKATTAPATTRNTGRGGEEKKKEKEKEEQEERETKTPECPSHTQPLGVYLLT

SEQ ID NO: 39 - protein, 69 aa, synthetic construct
  REGION 1..69: note = Synthetic Peptide
KAQASSVPTAQPQAEGSLAKATTAPATTRNTGRGGEEKKKEKEKEEQEERETKTPECPSHTQPLGVYLL

SEQ ID NO: 40 - protein, 69 aa, synthetic construct
  REGION 1..69: note = Synthetic Peptide
PKAQASSVPTAQPQAEGSLAKATTAPATTRNTGRGGEEKKKEKEKEEQEERETKTPECPSHTQPLGVYL

SEQ ID NO: 41 - protein, 69 aa, synthetic construct
  REGION 1..69: note = Synthetic Peptide
SPKAQASSVPTAQPQAEGSLAKATTAPATTRNTGRGGEEKKKEKEKEEQEERETKTPECPSHTQPLGVY

SEQ ID NO: 42 - protein, 69 aa, synthetic construct
  REGION 1..69: note = Synthetic Peptide
ESPKAQASSVPTAQPQAEGSLAKATTAPATTRNTGRGGEEKKKEKEKEEQEERETKTPECPSHTQPLGV

SEQ ID NO: 43 - protein, 69 aa, synthetic construct
  REGION 1..69: note = Synthetic Peptide
PESPKAQASSVPTAQPQAEGSLAKATTAPATTRNTGRGGEEKKKEKEKEEQEERETKTPECPSHTQPLG

SEQ ID NO: 44 - protein, 69 aa, synthetic construct
  REGION 1..69: note = Synthetic Peptide
WPESPKAQASSVPTAQPQAEGSLAKATTAPATTRNTGRGGEEKKKEKEKEEQEERETKTPECPSHTQPL

SEQ ID NO: 45 - protein, 69 aa, synthetic construct
  REGION 1..69: note = Synthetic Peptide
RWPESPKAQASSVPTAQPQAEGSLAKATTAPATTRNTGRGGEEKKKEKEKEEQEERETKTPECPSHTQP

SEQ ID NO: 46 - protein, 68 aa, synthetic construct
  REGION 1..68: note = Synthetic Peptide
ASSVPTAQPQAEGSLAKATTAPATTRNTGRGGEEKKKEKEKEEQEERETKTPECPSHTQPLGVYLLTP

SEQ ID NO: 47 - protein, 68 aa, synthetic construct
  REGION 1..68: note = Synthetic Peptide
QASSVPTAQPQAEGSLAKATTAPATTRNTGRGGEEKKKEKEKEEQEERETKTPECPSHTQPLGVYLLT

SEQ ID NO: 48 - protein, 68 aa, synthetic construct
  REGION 1..68: note = Synthetic Peptide
AQASSVPTAQPQAEGSLAKATTAPATTRNTGRGGEEKKKEKEKEEQEERETKTPECPSHTQPLGVYLL

SEQ ID NO: 49 - protein, 68 aa, synthetic construct
  REGION 1..68: note = Synthetic Peptide
KAQASSVPTAQPQAEGSLAKATTAPATTRNTGRGGEEKKKEKEKEEQEERETKTPECPSHTQPLGVYL

SEQ ID NO: 50 - protein, 68 aa, synthetic construct
  REGION 1..68: note = Synthetic Peptide
PKAQASSVPTAQPQAEGSLAKATTAPATTRNTGRGGEEKKKEKEKEEQEERETKTPECPSHTQPLGVY

SEQ ID NO: 51 - protein, 68 aa, synthetic construct
  REGION 1..68: note = Synthetic Peptide
SPKAQASSVPTAQPQAEGSLAKATTAPATTRNTGRGGEEKKKEKEKEEQEERETKTPECPSHTQPLGV

SEQ ID NO: 52 - protein, 68 aa, synthetic construct
  REGION 1..68: note = Synthetic Peptide
ESPKAQASSVPTAQPQAEGSLAKATTAPATTRNTGRGGEEKKKEKEKEEQEERETKTPECPSHTQPLG

SEQ ID NO: 53 - protein, 68 aa, synthetic construct
  REGION 1..68: note = Synthetic Peptide
PESPKAQASSVPTAQPQAEGSLAKATTAPATTRNTGRGGEEKKKEKEKEEQEERETKTPECPSHTQPL

SEQ ID NO: 54 - protein, 68 aa, synthetic construct
  REGION 1..68: note = Synthetic Peptide
WPESPKAQASSVPTAQPQAEGSLAKATTAPATTRNTGRGGEEKKKEKEKEEQEERETKTPECPSHTQP

SEQ ID NO: 55 - protein, 68 aa, synthetic construct
  REGION 1..68: note = Synthetic Peptide
RWPESPKAQASSVPTAQPQAEGSLAKATTAPATTRNTGRGGEEKKKEKEKEEQEERETKTPECPSHTQ

SEQ ID NO: 56 - protein, 67 aa, synthetic construct
  REGION 1..67: note = Synthetic Peptide
SSVPTAQPQAEGSLAKATTAPATTRNTGRGGEEKKKEKEKEEQEERETKTPECPSHTQPLGVYLLTP

SEQ ID NO: 57 - protein, 67 aa, synthetic construct
  REGION 1..67: note = Synthetic Peptide
ASSVPTAQPQAEGSLAKATTAPATTRNTGRGGEEKKKEKEKEEQEERETKTPECPSHTQPLGVYLLT

SEQ ID NO: 58 - protein, 67 aa, synthetic construct
  REGION 1..67: note = Synthetic Peptide
QASSVPTAQPQAEGSLAKATTAPATTRNTGRGGEEKKKEKEKEEQEERETKTPECPSHTQPLGVYLL

SEQ ID NO: 59 - protein, 67 aa, synthetic construct
  REGION 1..67: note = Synthetic Peptide
AQASSVPTAQPQAEGSLAKATTAPATTRNTGRGGEEKKKEKEKEEQEERETKTPECPSHTQPLGVYL

SEQ ID NO: 60 - protein, 67 aa, synthetic construct
  REGION 1..67: note = Synthetic Peptide
KAQASSVPTAQPQAEGSLAKATTAPATTRNTGRGGEEKKKEKEKEEQEERETKTPECPSHTQPLGVY

SEQ ID NO: 61 - protein, 67 aa, synthetic construct
  REGION 1..67: note = Synthetic Peptide
PKAQASSVPTAQPQAEGSLAKATTAPATTRNTGRGGEEKKKEKEKEEQEERETKTPECPSHTQPLGV

SEQ ID NO: 62 - protein, 67 aa, synthetic construct
  REGION 1..67: note = Synthetic Peptide
SPKAQASSVPTAQPQAEGSLAKATTAPATTRNTGRGGEEKKKEKEKEEQEERETKTPECPSHTQPLG

SEQ ID NO: 63 - protein, 67 aa, synthetic construct
  REGION 1..67: note = Synthetic Peptide
ESPKAQASSVPTAQPQAEGSLAKATTAPATTRNTGRGGEEKKKEKEKEEQEERETKTPECPSHTQPL

SEQ ID NO: 64 - protein, 67 aa, synthetic construct
  REGION 1..67: note = Synthetic Peptide
PESPKAQASSVPTAQPQAEGSLAKATTAPATTRNTGRGGEEKKKEKEKEEQEERETKTPECPSHTQP

SEQ ID NO: 65 - protein, 67 aa, synthetic construct
  REGION 1..67: note = Synthetic Peptide
WPESPKAQASSVPTAQPQAEGSLAKATTAPATTRNTGRGGEEKKKEKEKEEQEERETKTPECPSHTQ

SEQ ID NO: 66 - protein, 67 aa, synthetic construct
  REGION 1..67: note = Synthetic Peptide
RWPESPKAQASSVPTAQPQAEGSLAKATTAPATTRNTGRGGEEKKKEKEKEEQEERETKTPECPSHT

SEQ ID NO: 67 - protein, 66 aa, synthetic construct
  REGION 1..66: note = Synthetic Peptide
SVPTAQPQAEGSLAKATTAPATTRNTGRGGEEKKKEKEKEEQEERETKTPECPSHTQPLGVYLLTP

SEQ ID NO: 68 - protein, 66 aa, synthetic construct
  REGION 1..66: note = Synthetic Peptide
SSVPTAQPQAEGSLAKATTAPATTRNTGRGGEEKKKEKEKEEQEERETKTPECPSHTQPLGVYLLT

SEQ ID NO: 69 - protein, 66 aa, synthetic construct
  REGION 1..66: note = Synthetic Peptide
ASSVPTAQPQAEGSLAKATTAPATTRNTGRGGEEKKKEKEKEEQEERETKTPECPSHTQPLGVYLL

SEQ ID NO: 70 - protein, 66 aa, synthetic construct
  REGION 1..66: note = Synthetic Peptide
QASSVPTAQPQAEGSLAKATTAPATTRNTGRGGEEKKKEKEKEEQEERETKTPECPSHTQPLGVYL

SEQ ID NO: 71 - protein, 66 aa, synthetic construct
  REGION 1..66: note = Synthetic Peptide
AQASSVPTAQPQAEGSLAKATTAPATTRNTGRGGEEKKKEKEKEEQEERETKTPECPSHTQPLGVY

SEQ ID NO: 72 - protein, 66 aa, synthetic construct
  REGION 1..66: note = Synthetic Peptide
KAQASSVPTAQPQAEGSLAKATTAPATTRNTGRGGEEKKKEKEKEEQEERETKTPECPSHTQPLGV

SEQ ID NO: 73 - protein, 66 aa, synthetic construct
  REGION 1..66: note = Synthetic Peptide
PKAQASSVPTAQPQAEGSLAKATTAPATTRNTGRGGEEKKKEKEKEEQEERETKTPECPSHTQPLG

SEQ ID NO: 74 - protein, 66 aa, synthetic construct
  REGION 1..66: note = Synthetic Peptide
SPKAQASSVPTAQPQAEGSLAKATTAPATTRNTGRGGEEKKKEKEKEEQEERETKTPECPSHTQPL

SEQ ID NO: 75 - protein, 66 aa, synthetic construct
  REGION 1..66: note = Synthetic Peptide
ESPKAQASSVPTAQPQAEGSLAKATTAPATTRNTGRGGEEKKKEKEKEEQEERETKTPECPSHTQP

SEQ ID NO: 76 - protein, 66 aa, synthetic construct
  REGION 1..66: note = Synthetic Peptide
PESPKAQASSVPTAQPQAEGSLAKATTAPATTRNTGRGGEEKKKEKEKEEQEERETKTPECPSHTQ

SEQ ID NO: 77 - protein, 66 aa, synthetic construct
  REGION 1..66: note = Synthetic Peptide
WPESPKAQASSVPTAQPQAEGSLAKATTAPATTRNTGRGGEEKKKEKEKEEQEERETKTPECPSHT

SEQ ID NO: 78 - protein, 66 aa, synthetic construct
  REGION 1..66: note = Synthetic Peptide
RWPESPKAQASSVPTAQPQAEGSLAKATTAPATTRNTGRGGEEKKKEKEKEEQEERETKTPECPSH

SEQ ID NO: 79 - protein, 65 aa, synthetic construct
  REGION 1..65: note = Synthetic Peptide
VPTAQPQAEGSLAKATTAPATTRNTGRGGEEKKKEKEKEEQEERETKTPECPSHTQPLGVYLLTP

SEQ ID NO: 80 - protein, 65 aa, synthetic construct
  REGION 1..65: note = Synthetic Peptide
SVPTAQPQAEGSLAKATTAPATTRNTGRGGEEKKKEKEKEEQEERETKTPECPSHTQPLGVYLLT

SEQ ID NO: 81 - protein, 65 aa, synthetic construct
  REGION 1..65: note = Synthetic Peptide
SSVPTAQPQAEGSLAKATTAPATTRNTGRGGEEKKKEKEKEEQEERETKTPECPSHTQPLGVYLL

SEQ ID NO: 82 - protein, 65 aa, synthetic construct
  REGION 1..65: note = Synthetic Peptide
ASSVPTAQPQAEGSLAKATTAPATTRNTGRGGEEKKKEKEKEEQEERETKTPECPSHTQPLGVYL

SEQ ID NO: 83 - protein, 65 aa, synthetic construct
  REGION 1..65: note = Synthetic Peptide
QASSVPTAQPQAEGSLAKATTAPATTRNTGRGGEEKKKEKEKEEQEERETKTPECPSHTQPLGVY

SEQ ID NO: 84 - protein, 65 aa, synthetic construct
  REGION 1..65: note = Synthetic Peptide
AQASSVPTAQPQAEGSLAKATTAPATTRNTGRGGEEKKKEKEKEEQEERETKTPECPSHTQPLGV

SEQ ID NO: 85 - protein, 65 aa, synthetic construct
  REGION 1..65: note = Synthetic Peptide
KAQASSVPTAQPQAEGSLAKATTAPATTRNTGRGGEEKKKEKEKEEQEERETKTPECPSHTQPLG

SEQ ID NO: 86 - protein, 65 aa, synthetic construct
  REGION 1..65: note = Synthetic Peptide
PKAQASSVPTAQPQAEGSLAKATTAPATTRNTGRGGEEKKKEKEKEEQEERETKTPECPSHTQPL

SEQ ID NO: 87 - protein, 65 aa, synthetic construct
  REGION 1..65: note = Synthetic Peptide
SPKAQASSVPTAQPQAEGSLAKATTAPATTRNTGRGGEEKKKEKEKEEQEERETKTPECPSHTQP

SEQ ID NO: 88 - protein, 65 aa, synthetic construct
  REGION 1..65: note = Synthetic Peptide
ESPKAQASSVPTAQPQAEGSLAKATTAPATTRNTGRGGEEKKKEKEKEEQEERETKTPECPSHTQ

SEQ ID NO: 89 - protein, 65 aa, synthetic construct
  REGION 1..65: note = Synthetic Peptide
PESPKAQASSVPTAQPQAEGSLAKATTAPATTRNTGRGGEEKKKEKEKEEQEERETKTPECPSHT

SEQ ID NO: 90 - protein, 65 aa, synthetic construct
  REGION 1..65: note = Synthetic Peptide
WPESPKAQASSVPTAQPQAEGSLAKATTAPATTRNTGRGGEEKKKEKEKEEQEERETKTPECPSH

SEQ ID NO: 91 - protein, 65 aa, synthetic construct
  REGION 1..65: note = Synthetic Peptide
RWPESPKAQASSVPTAQPQAEGSLAKATTAPATTRNTGRGGEEKKKEKEKEEQEERETKTPECPS

SEQ ID NO: 92 - protein, 64 aa, synthetic construct
  REGION 1..64: note = Synthetic Peptide
PTAQPQAEGSLAKATTAPATTRNTGRGGEEKKKEKEKEEQEERETKTPECPSHTQPLGVYLLTP

SEQ ID NO: 93 - protein, 64 aa, synthetic construct
  REGION 1..64: note = Synthetic Peptide
VPTAQPQAEGSLAKATTAPATTRNTGRGGEEKKKEKEKEEQEERETKTPECPSHTQPLGVYLLT

SEQ ID NO: 94 - protein, 64 aa, synthetic construct
  REGION 1..64: note = Synthetic Peptide
SVPTAQPQAEGSLAKATTAPATTRNTGRGGEEKKKEKEKEEQEERETKTPECPSHTQPLGVYLL

SEQ ID NO: 95 - protein, 64 aa, synthetic construct
  REGION 1..64: note = Synthetic Peptide
SSVPTAQPQAEGSLAKATTAPATTRNTGRGGEEKKKEKEKEEQEERETKTPECPSHTQPLGVYL

SEQ ID NO: 96 - protein, 64 aa, synthetic construct
  REGION 1..64: note = Synthetic Peptide
ASSVPTAQPQAEGSLAKATTAPATTRNTGRGGEEKKKEKEKEEQEERETKTPECPSHTQPLGVY

SEQ ID NO: 97 - protein, 64 aa, synthetic construct
  REGION 1..64: note = Synthetic Peptide
QASSVPTAQPQAEGSLAKATTAPATTRNTGRGGEEKKKEKEKEEQEERETKTPECPSHTQPLGV

SEQ ID NO: 98 - protein, 64 aa, synthetic construct
  REGION 1..64: note = Synthetic Peptide
AQASSVPTAQPQAEGSLAKATTAPATTRNTGRGGEEKKKEKEKEEQEERETKTPECPSHTQPLG

SEQ ID NO: 99 - protein, 64 aa, synthetic construct
  REGION 1..64: note = Synthetic Peptide
KAQASSVPTAQPQAEGSLAKATTAPATTRNTGRGGEEKKKEKEKEEQEERETKTPECPSHTQPL

SEQ ID NO: 100 - protein, 64 aa, synthetic construct
  REGION 1..64: note = Synthetic Peptide
PKAQASSVPTAQPQAEGSLAKATTAPATTRNTGRGGEEKKKEKEKEEQEERETKTPECPSHTQP

SEQ ID NO: 101 - protein, 64 aa, synthetic construct
  REGION 1..64: note = Synthetic Peptide
SPKAQASSVPTAQPQAEGSLAKATTAPATTRNTGRGGEEKKKEKEKEEQEERETKTPECPSHTQ

SEQ ID NO: 102 - protein, 64 aa, synthetic construct
  REGION 1..64: note = Synthetic Peptide
ESPKAQASSVPTAQPQAEGSLAKATTAPATTRNTGRGGEEKKKEKEKEEQEERETKTPECPSHT

SEQ ID NO: 103 - protein, 64 aa, synthetic construct
  REGION 1..64: note = Synthetic Peptide
PESPKAQASSVPTAQPQAEGSLAKATTAPATTRNTGRGGEEKKKEKEKEEQEERETKTPECPSH

SEQ ID NO: 104 - protein, 64 aa, synthetic construct
  REGION 1..64: note = Synthetic Peptide
WPESPKAQASSVPTAQPQAEGSLAKATTAPATTRNTGRGGEEKKKEKEKEEQEERETKTPECPS

SEQ ID NO: 105 - protein, 64 aa, synthetic construct
  REGION 1..64: note = Synthetic Peptide
RWPESPKAQASSVPTAQPQAEGSLAKATTAPATTRNTGRGGEEKKKEKEKEEQEERETKTPECP

SEQ ID NO: 106 - protein, 63 aa, synthetic construct
  REGION 1..63: note = Synthetic Peptide
TAQPQAEGSLAKATTAPATTRNTGRGGEEKKKEKEKEEQEERETKTPECPSHTQPLGVYLLTP

SEQ ID NO: 107 - protein, 63 aa, synthetic construct
  REGION 1..63: note = Synthetic Peptide
PTAQPQAEGSLAKATTAPATTRNTGRGGEEKKKEKEKEEQEERETKTPECPSHTQPLGVYLLT

SEQ ID NO: 108 - protein, 63 aa, synthetic construct
  REGION 1..63: note = Synthetic Peptide
VPTAQPQAEGSLAKATTAPATTRNTGRGGEEKKKEKEKEEQEERETKTPECPSHTQPLGVYLL

SEQ ID NO: 109 - protein, 63 aa, synthetic construct
  REGION 1..63: note = Synthetic Peptide
SVPTAQPQAEGSLAKATTAPATTRNTGRGGEEKKKEKEKEEQEERETKTPECPSHTQPLGVYL

SEQ ID NO: 110 - protein, 63 aa, synthetic construct
  REGION 1..63: note = Synthetic Peptide
SSVPTAQPQAEGSLAKATTAPATTRNTGRGGEEKKKEKEKEEQEERETKTPECPSHTQPLGVY

SEQ ID NO: 111 - protein, 63 aa, synthetic construct
  REGION 1..63: note = Synthetic Peptide
ASSVPTAQPQAEGSLAKATTAPATTRNTGRGGEEKKKEKEKEEQEERETKTPECPSHTQPLGV

SEQ ID NO: 112 - protein, 63 aa, synthetic construct
  REGION 1..63: note = Synthetic Peptide
QASSVPTAQPQAEGSLAKATTAPATTRNTGRGGEEKKKEKEKEEQEERETKTPECPSHTQPLG

SEQ ID NO: 113 - protein, 63 aa, synthetic construct
  REGION 1..63: note = Synthetic Peptide
AQASSVPTAQPQAEGSLAKATTAPATTRNTGRGGEEKKKEKEKEEQEERETKTPECPSHTQPL

SEQ ID NO: 114 - protein, 63 aa, synthetic construct
  REGION 1..63: note = Synthetic Peptide
KAQASSVPTAQPQAEGSLAKATTAPATTRNTGRGGEEKKKEKEKEEQEERETKTPECPSHTQP

SEQ ID NO: 115 - protein, 63 aa, synthetic construct
  REGION 1..63: note = Synthetic Peptide
PKAQASSVPTAQPQAEGSLAKATTAPATTRNTGRGGEEKKKEKEKEEQEERETKTPECPSHTQ

SEQ ID NO: 116 - protein, 63 aa, synthetic construct
  REGION 1..63: note = Synthetic Peptide
SPKAQASSVPTAQPQAEGSLAKATTAPATTRNTGRGGEEKKKEKEKEEQEERETKTPECPSHT

SEQ ID NO: 117 - protein, 63 aa, synthetic construct
  REGION 1..63: note = Synthetic Peptide
ESPKAQASSVPTAQPQAEGSLAKATTAPATTRNTGRGGEEKKKEKEKEEQEERETKTPECPSH

SEQ ID NO: 118 - protein, 63 aa, synthetic construct
  REGION 1..63: note = Synthetic Peptide
PESPKAQASSVPTAQPQAEGSLAKATTAPATTRNTGRGGEEKKKEKEKEEQEERETKTPECPS

SEQ ID NO: 119 - protein, 63 aa, synthetic construct
  REGION 1..63: note = Synthetic Peptide
WPESPKAQASSVPTAQPQAEGSLAKATTAPATTRNTGRGGEEKKKEKEKEEQEERETKTPECP

SEQ ID NO: 120 - protein, 63 aa, synthetic construct
  REGION 1..63: note = Synthetic Peptide
RWPESPKAQASSVPTAQPQAEGSLAKATTAPATTRNTGRGGEEKKKEKEKEEQEERETKTPEC

SEQ ID NO: 121 - protein, 62 aa, synthetic construct
  REGION 1..62: note = Synthetic Peptide
AQPQAEGSLAKATTAPATTRNTGRGGEEKKKEKEKEEQEERETKTPECPSHTQPLGVYLLTP

SEQ ID NO: 122 - protein, 62 aa, synthetic construct
  REGION 1..62: note = Synthetic Peptide
TAQPQAEGSLAKATTAPATTRNTGRGGEEKKKEKEKEEQEERETKTPECPSHTQPLGVYLLT

SEQ ID NO: 123 - protein, 62 aa, synthetic construct
  REGION 1..62: note = Synthetic Peptide
PTAQPQAEGSLAKATTAPATTRNTGRGGEEKKKEKEKEEQEERETKTPECPSHTQPLGVYLL

SEQ ID NO: 124 - protein, 62 aa, synthetic construct
  REGION 1..62: note = Synthetic Peptide
VPTAQPQAEGSLAKATTAPATTRNTGRGGEEKKKEKEKEEQEERETKTPECPSHTQPLGVYL

SEQ ID NO: 125 - protein, 62 aa, synthetic construct
  REGION 1..62: note = Synthetic Peptide
SVPTAQPQAEGSLAKATTAPATTRNTGRGGEEKKKEKEKEEQEERETKTPECPSHTQPLGVY

SEQ ID NO: 126 - protein, 62 aa, synthetic construct
  REGION 1..62: note = Synthetic Peptide
SSVPTAQPQAEGSLAKATTAPATTRNTGRGGEEKKKEKEKEEQEERETKTPECPSHTQPLGV

SEQ ID NO: 127 - protein, 62 aa, synthetic construct
  REGION 1..62: note = Synthetic Peptide
ASSVPTAQPQAEGSLAKATTAPATTRNTGRGGEEKKKEKEKEEQEERETKTPECPSHTQPLG

SEQ ID NO: 128 - protein, 62 aa, synthetic construct
  REGION 1..62: note = Synthetic Peptide
QASSVPTAQPQAEGSLAKATTAPATTRNTGRGGEEKKKEKEKEEQEERETKTPECPSHTQPL

SEQ ID NO: 129 - protein, 62 aa, synthetic construct
  REGION 1..62: note = Synthetic Peptide
AQASSVPTAQPQAEGSLAKATTAPATTRNTGRGGEEKKKEKEKEEQEERETKTPECPSHTQP

SEQ ID NO: 130 - protein, 62 aa, synthetic construct
  REGION 1..62: note = Synthetic Peptide
KAQASSVPTAQPQAEGSLAKATTAPATTRNTGRGGEEKKKEKEKEEQEERETKTPECPSHTQ

SEQ ID NO: 131 - protein, 62 aa, synthetic construct
  REGION 1..62: note = Synthetic Peptide
PKAQASSVPTAQPQAEGSLAKATTAPATTRNTGRGGEEKKKEKEKEEQEERETKTPECPSHT

SEQ ID NO: 132 - protein, 62 aa, synthetic construct
  REGION 1..62: note = Synthetic Peptide
SPKAQASSVPTAQPQAEGSLAKATTAPATTRNTGRGGEEKKKEKEKEEQEERETKTPECPSH

SEQ ID NO: 133 - protein, 62 aa, synthetic construct
  REGION 1..62: note = Synthetic Peptide
ESPKAQASSVPTAQPQAEGSLAKATTAPATTRNTGRGGEEKKKEKEKEEQEERETKTPECPS

SEQ ID NO: 134 - protein, 62 aa, synthetic construct
  REGION 1..62: note = Synthetic Peptide
PESPKAQASSVPTAQPQAEGSLAKATTAPATTRNTGRGGEEKKKEKEKEEQEERETKTPECP

SEQ ID NO: 135 - protein, 62 aa, synthetic construct
  REGION 1..62: note = Synthetic Peptide
WPESPKAQASSVPTAQPQAEGSLAKATTAPATTRNTGRGGEEKKKEKEKEEQEERETKTPEC

SEQ ID NO: 136 - protein, 62 aa, synthetic construct
  REGION 1..62: note = Synthetic Peptide
RWPESPKAQASSVPTAQPQAEGSLAKATTAPATTRNTGRGGEEKKKEKEKEEQEERETKTPE

SEQ ID NO: 137 - protein, 61 aa, synthetic construct
  REGION 1..61: note = Synthetic Peptide
QPQAEGSLAKATTAPATTRNTGRGGEEKKKEKEKEEQEERETKTPECPSHTQPLGVYLLTP

SEQ ID NO: 138 - protein, 61 aa, synthetic construct
  REGION 1..61: note = Synthetic Peptide
AQPQAEGSLAKATTAPATTRNTGRGGEEKKKEKEKEEQEERETKTPECPSHTQPLGVYLLT

SEQ ID NO: 139 - protein, 61 aa, synthetic construct
  REGION 1..61: note = Synthetic Peptide
TAQPQAEGSLAKATTAPATTRNTGRGGEEKKKEKEKEEQEERETKTPECPSHTQPLGVYLL

SEQ ID NO: 140 - protein, 61 aa, synthetic construct
  REGION 1..61: note = Synthetic Peptide
PTAQPQAEGSLAKATTAPATTRNTGRGGEEKKKEKEKEEQEERETKTPECPSHTQPLGVYL

SEQ ID NO: 141 - protein, 61 aa, synthetic construct
  REGION 1..61: note = Synthetic Peptide
VPTAQPQAEGSLAKATTAPATTRNTGRGGEEKKKEKEKEEQEERETKTPECPSHTQPLGVY

SEQ ID NO: 142 - protein, 61 aa, synthetic construct
  REGION 1..61: note = Synthetic Peptide
SVPTAQPQAEGSLAKATTAPATTRNTGRGGEEKKKEKEKEEQEERETKTPECPSHTQPLGV

SEQ ID NO: 143 - protein, 61 aa, synthetic construct
  REGION 1..61: note = Synthetic Peptide
SSVPTAQPQAEGSLAKATTAPATTRNTGRGGEEKKKEKEKEEQEERETKTPECPSHTQPLG

SEQ ID NO: 144 - protein, 61 aa, synthetic construct
  REGION 1..61: note = Synthetic Peptide
ASSVPTAQPQAEGSLAKATTAPATTRNTGRGGEEKKKEKEKEEQEERETKTPECPSHTQPL

SEQ ID NO: 145 - protein, 61 aa, synthetic construct
  REGION 1..61: note = Synthetic Peptide
QASSVPTAQPQAEGSLAKATTAPATTRNTGRGGEEKKKEKEKEEQEERETKTPECPSHTQP

SEQ ID NO: 146 - protein, 61 aa, synthetic construct
  REGION 1..61: note = Synthetic Peptide
AQASSVPTAQPQAEGSLAKATTAPATTRNTGRGGEEKKKEKEKEEQEERETKTPECPSHTQ

SEQ ID NO: 147 - protein, 61 aa, synthetic construct
  REGION 1..61: note = Synthetic Peptide
KAQASSVPTAQPQAEGSLAKATTAPATTRNTGRGGEEKKKEKEKEEQEERETKTPECPSHT

SEQ ID NO: 148 - protein, 61 aa, synthetic construct
  REGION 1..61: note = Synthetic Peptide
PKAQASSVPTAQPQAEGSLAKATTAPATTRNTGRGGEEKKKEKEKEEQEERETKTPECPSH

SEQ ID NO: 149 - protein, 61 aa, synthetic construct
  REGION 1..61: note = Synthetic Peptide
SPKAQASSVPTAQPQAEGSLAKATTAPATTRNTGRGGEEKKKEKEKEEQEERETKTPECPS

SEQ ID NO: 150 - protein, 61 aa, synthetic construct
  REGION 1..61: note = Synthetic Peptide
ESPKAQASSVPTAQPQAEGSLAKATTAPATTRNTGRGGEEKKKEKEKEEQEERETKTPECP

SEQ ID NO: 151 - protein, 61 aa, synthetic construct
  REGION 1..61: note = Synthetic Peptide
PESPKAQASSVPTAQPQAEGSLAKATTAPATTRNTGRGGEEKKKEKEKEEQEERETKTPEC

SEQ ID NO: 152 - protein, 61 aa, synthetic construct
  REGION 1..61: note = Synthetic Peptide
WPESPKAQASSVPTAQPQAEGSLAKATTAPATTRNTGRGGEEKKKEKEKEEQEERETKTPE

SEQ ID NO: 153 - protein, 61 aa, synthetic construct
  REGION 1..61: note = Synthetic Peptide
RWPESPKAQASSVPTAQPQAEGSLAKATTAPATTRNTGRGGEEKKKEKEKEEQEERETKTP

SEQ ID NO: 154 - protein, 60 aa, synthetic construct
  REGION 1..60: note = Synthetic Peptide
PQAEGSLAKATTAPATTRNTGRGGEEKKKEKEKEEQEERETKTPECPSHTQPLGVYLLTP

SEQ ID NO: 155 - protein, 60 aa, synthetic construct
  REGION 1..60: note = Synthetic Peptide
QPQAEGSLAKATTAPATTRNTGRGGEEKKKEKEKEEQEERETKTPECPSHTQPLGVYLLT

SEQ ID NO: 156 - protein, 60 aa, synthetic construct
  REGION 1..60: note = Synthetic Peptide
AQPQAEGSLAKATTAPATTRNTGRGGEEKKKEKEKEEQEERETKTPECPSHTQPLGVYLL

SEQ ID NO: 157 - protein, 60 aa, synthetic construct
  REGION 1..60: note = Synthetic Peptide
TAQPQAEGSLAKATTAPATTRNTGRGGEEKKKEKEKEEQEERETKTPECPSHTQPLGVYL

SEQ ID NO: 158 - protein, 60 aa, synthetic construct
  REGION 1..60: note = Synthetic Peptide
PTAQPQAEGSLAKATTAPATTRNTGRGGEEKKKEKEKEEQEERETKTPECPSHTQPLGVY

SEQ ID NO: 159 - protein, 60 aa, synthetic construct
  REGION 1..60: note = Synthetic Peptide
VPTAQPQAEGSLAKATTAPATTRNTGRGGEEKKKEKEKEEQEERETKTPECPSHTQPLGV

SEQ ID NO: 160 - protein, 60 aa, synthetic construct
  REGION 1..60: note = Synthetic Peptide
SVPTAQPQAEGSLAKATTAPATTRNTGRGGEEKKKEKEKEEQEERETKTPECPSHTQPLG

SEQ ID NO: 161 - protein, 60 aa, synthetic construct
  REGION 1..60: note = Synthetic Peptide
SSVPTAQPQAEGSLAKATTAPATTRNTGRGGEEKKKEKEKEEQEERETKTPECPSHTQPL

SEQ ID NO: 162 - protein, 60 aa, synthetic construct
  REGION 1..60: note = Synthetic Peptide
ASSVPTAQPQAEGSLAKATTAPATTRNTGRGGEEKKKEKEKEEQEERETKTPECPSHTQP

SEQ ID NO: 163 - protein, 60 aa, synthetic construct
  REGION 1..60: note = Synthetic Peptide
QASSVPTAQPQAEGSLAKATTAPATTRNTGRGGEEKKKEKEKEEQEERETKTPECPSHTQ

SEQ ID NO: 164 - protein, 60 aa, synthetic construct
  REGION 1..60: note = Synthetic Peptide
AQASSVPTAQPQAEGSLAKATTAPATTRNTGRGGEEKKKEKEKEEQEERETKTPECPSHT

SEQ ID NO: 165 - protein, 60 aa, synthetic construct
  REGION 1..60: note = Synthetic Peptide
KAQASSVPTAQPQAEGSLAKATTAPATTRNTGRGGEEKKKEKEKEEQEERETKTPECPSH

SEQ ID NO: 166 - protein, 60 aa, synthetic construct
  REGION 1..60: note = Synthetic Peptide
PKAQASSVPTAQPQAEGSLAKATTAPATTRNTGRGGEEKKKEKEKEEQEERETKTPECPS

SEQ ID NO: 167 - protein, 60 aa, synthetic construct
  REGION 1..60: note = Synthetic Peptide
SPKAQASSVPTAQPQAEGSLAKATTAPATTRNTGRGGEEKKKEKEKEEQEERETKTPECP

SEQ ID NO: 168 - protein, 60 aa, synthetic construct
  REGION 1..60: note = Synthetic Peptide
ESPKAQASSVPTAQPQAEGSLAKATTAPATTRNTGRGGEEKKKEKEKEEQEERETKTPEC

SEQ ID NO: 169 - protein, 60 aa, synthetic construct
  REGION 1..60: note = Synthetic Peptide
PESPKAQASSVPTAQPQAEGSLAKATTAPATTRNTGRGGEEKKKEKEKEEQEERETKTPE

SEQ ID NO: 170 - protein, 60 aa, synthetic construct
  REGION 1..60: note = Synthetic Peptide
WPESPKAQASSVPTAQPQAEGSLAKATTAPATTRNTGRGGEEKKKEKEKEEQEERETKTP

SEQ ID NO: 171 - protein, 60 aa, synthetic construct
  REGION 1..60: note = Synthetic Peptide
RWPESPKAQASSVPTAQPQAEGSLAKATTAPATTRNTGRGGEEKKKEKEKEEQEERETKT

SEQ ID NO: 172 - protein, 59 aa, synthetic construct
  REGION 1..59: note = Synthetic Peptide
QAEGSLAKATTAPATTRNTGRGGEEKKKEKEKEEQEERETKTPECPSHTQPLGVYLLTP

SEQ ID NO: 173 - protein, 59 aa, synthetic construct
  REGION 1..59: note = Synthetic Peptide
PQAEGSLAKATTAPATTRNTGRGGEEKKKEKEKEEQEERETKTPECPSHTQPLGVYLLT

SEQ ID NO: 174 - protein, 59 aa, synthetic construct
  REGION 1..59: note = Synthetic Peptide
QPQAEGSLAKATTAPATTRNTGRGGEEKKKEKEKEEQEERETKTPECPSHTQPLGVYLL

SEQ ID NO: 175 - protein, 59 aa, synthetic construct
  REGION 1..59: note = Synthetic Peptide
AQPQAEGSLAKATTAPATTRNTGRGGEEKKKEKEKEEQEERETKTPECPSHTQPLGVYL

SEQ ID NO: 176 - protein, 59 aa, synthetic construct
  REGION 1..59: note = Synthetic Peptide
TAQPQAEGSLAKATTAPATTRNTGRGGEEKKKEKEKEEQEERETKTPECPSHTQPLGVY

SEQ ID NO: 177 - protein, 59 aa, synthetic construct
  REGION 1..59: note = Synthetic Peptide
PTAQPQAEGSLAKATTAPATTRNTGRGGEEKKKEKEKEEQEERETKTPECPSHTQPLGV

SEQ ID NO: 178 - protein, 59 aa, synthetic construct
  REGION 1..59: note = Synthetic Peptide
VPTAQPQAEGSLAKATTAPATTRNTGRGGEEKKKEKEKEEQEERETKTPECPSHTQPLG

SEQ ID NO: 179 - protein, 59 aa, synthetic construct
  REGION 1..59: note = Synthetic Peptide
SVPTAQPQAEGSLAKATTAPATTRNTGRGGEEKKKEKEKEEQEERETKTPECPSHTQPL

SEQ ID NO: 180 - protein, 59 aa, synthetic construct
  REGION 1..59: note = Synthetic Peptide
SSVPTAQPQAEGSLAKATTAPATTRNTGRGGEEKKKEKEKEEQEERETKTPECPSHTQP

SEQ ID NO: 181 - protein, 59 aa, synthetic construct
  REGION 1..59: note = Synthetic Peptide
ASSVPTAQPQAEGSLAKATTAPATTRNTGRGGEEKKKEKEKEEQEERETKTPECPSHTQ

SEQ ID NO: 182 - protein, 59 aa, synthetic construct
  REGION 1..59: note = Synthetic Peptide
QASSVPTAQPQAEGSLAKATTAPATTRNTGRGGEEKKKEKEKEEQEERETKTPECPSHT

SEQ ID NO: 183 - protein, 59 aa, synthetic construct
  REGION 1..59: note = Synthetic Peptide
AQASSVPTAQPQAEGSLAKATTAPATTRNTGRGGEEKKKEKEKEEQEERETKTPECPSH

SEQ ID NO: 184 - protein, 59 aa, synthetic construct
  REGION 1..59: note = Synthetic Peptide
KAQASSVPTAQPQAEGSLAKATTAPATTRNTGRGGEEKKKEKEKEEQEERETKTPECPS

SEQ ID NO: 185 - protein, 59 aa, synthetic construct
  REGION 1..59: note = Synthetic Peptide
PKAQASSVPTAQPQAEGSLAKATTAPATTRNTGRGGEEKKKEKEKEEQEERETKTPECP

SEQ ID NO: 186 - protein, 59 aa, synthetic construct
  REGION 1..59: note = Synthetic Peptide
SPKAQASSVPTAQPQAEGSLAKATTAPATTRNTGRGGEEKKKEKEKEEQEERETKTPEC

SEQ ID NO: 187 - protein, 59 aa, synthetic construct
  REGION 1..59: note = Synthetic Peptide
ESPKAQASSVPTAQPQAEGSLAKATTAPATTRNTGRGGEEKKKEKEKEEQEERETKTPE

SEQ ID NO: 188 - protein, 59 aa, synthetic construct
  REGION 1..59: note = Synthetic Peptide
PESPKAQASSVPTAQPQAEGSLAKATTAPATTRNTGRGGEEKKKEKEKEEQEERETKTP

SEQ ID NO: 189 - protein, 59 aa, synthetic construct
  REGION 1..59: note = Synthetic Peptide
RWPESPKAQASSVPTAQPQAEGSLAKATTAPATTRNTGRGGEEKKKEKEKEEQEERETK

SEQ ID NO: 190 - protein, 59 aa, synthetic construct
  REGION 1..59: note = Synthetic Peptide
WPESPKAQASSVPTAQPQAEGSLAKATTAPATTRNTGRGGEEKKKEKEKEEQEERETKT

SEQ ID NO: 191 - protein, 58 aa, synthetic construct
  REGION 1..58: note = Synthetic Peptide
AEGSLAKATTAPATTRNTGRGGEEKKKEKEKEEQEERETKTPECPSHTQPLGVYLLTP

SEQ ID NO: 192 - protein, 58 aa, synthetic construct
  REGION 1..58: note = Synthetic Peptide
QAEGSLAKATTAPATTRNTGRGGEEKKKEKEKEEQEERETKTPECPSHTQPLGVYLLT

SEQ ID NO: 193 - protein, 58 aa, synthetic construct
  REGION 1..58: note = Synthetic Peptide
PQAEGSLAKATTAPATTRNTGRGGEEKKKEKEKEEQEERETKTPECPSHTQPLGVYLL

SEQ ID NO: 194 - protein, 58 aa, synthetic construct
  REGION 1..58: note = Synthetic Peptide
QPQAEGSLAKATTAPATTRNTGRGGEEKKKEKEKEEQEERETKTPECPSHTQPLGVYL

SEQ ID NO: 195 - protein, 58 aa, synthetic construct
  REGION 1..58: note = Synthetic Peptide
AQPQAEGSLAKATTAPATTRNTGRGGEEKKKEKEKEEQEERETKTPECPSHTQPLGVY

SEQ ID NO: 196 - protein, 58 aa, synthetic construct
  REGION 1..58: note = Synthetic Peptide
TAQPQAEGSLAKATTAPATTRNTGRGGEEKKKEKEKEEQEERETKTPECPSHTQPLGV

SEQ ID NO: 197 - protein, 58 aa, synthetic construct
  REGION 1..58: note = Synthetic Peptide
PTAQPQAEGSLAKATTAPATTRNTGRGGEEKKKEKEKEEQEERETKTPECPSHTQPLG

SEQ ID NO: 198 - protein, 58 aa, synthetic construct
  REGION 1..58: note = Synthetic Peptide
VPTAQPQAEGSLAKATTAPATTRNTGRGGEEKKKEKEKEEQEERETKTPECPSHTQPL

SEQ ID NO: 199 - protein, 58 aa, synthetic construct
  REGION 1..58: note = Synthetic Peptide
SVPTAQPQAEGSLAKATTAPATTRNTGRGGEEKKKEKEKEEQEERETKTPECPSHTQP

SEQ ID NO: 200 - protein, 58 aa, synthetic construct
  REGION 1..58: note = Synthetic Peptide
SSVPTAQPQAEGSLAKATTAPATTRNTGRGGEEKKKEKEKEEQEERETKTPECPSHTQ

SEQ ID NO: 201 - protein, 58 aa, synthetic construct
  REGION 1..58: note = Synthetic Peptide
ASSVPTAQPQAEGSLAKATTAPATTRNTGRGGEEKKKEKEKEEQEERETKTPECPSHT

SEQ ID NO: 202 - protein, 58 aa, synthetic construct
  REGION 1..58: note = Synthetic Peptide
QASSVPTAQPQAEGSLAKATTAPATTRNTGRGGEEKKKEKEKEEQEERETKTPECPSH

SEQ ID NO: 203 - protein, 58 aa, synthetic construct
  REGION 1..58: note = Synthetic Peptide
AQASSVPTAQPQAEGSLAKATTAPATTRNTGRGGEEKKKEKEKEEQEERETKTPECPS

SEQ ID NO: 204 - protein, 58 aa, synthetic construct
  REGION 1..58: note = Synthetic Peptide
KAQASSVPTAQPQAEGSLAKATTAPATTRNTGRGGEEKKKEKEKEEQEERETKTPECP

SEQ ID NO: 205 - protein, 58 aa, synthetic construct
  REGION 1..58: note = Synthetic Peptide
PKAQASSVPTAQPQAEGSLAKATTAPATTRNTGRGGEEKKKEKEKEEQEERETKTPEC

SEQ ID NO: 206 - protein, 58 aa, synthetic construct
  REGION 1..58: note = Synthetic Peptide
SPKAQASSVPTAQPQAEGSLAKATTAPATTRNTGRGGEEKKKEKEKEEQEERETKTPE

SEQ ID NO: 207 - protein, 58 aa, synthetic construct
  REGION 1..58: note = Synthetic Peptide
ESPKAQASSVPTAQPQAEGSLAKATTAPATTRNTGRGGEEKKKEKEKEEQEERETKTP

SEQ ID NO: 208 - protein, 58 aa, synthetic construct
  REGION 1..58: note = Synthetic Peptide
PESPKAQASSVPTAQPQAEGSLAKATTAPATTRNTGRGGEEKKKEKEKEEQEERETKT

SEQ ID NO: 209 - protein, 58 aa, synthetic construct
  REGION 1..58: note = Synthetic Peptide
WPESPKAQASSVPTAQPQAEGSLAKATTAPATTRNTGRGGEEKKKEKEKEEQEERETK

SEQ ID NO: 210 - protein, 58 aa, synthetic construct
  REGION 1..58: note = Synthetic Peptide
RWPESPKAQASSVPTAQPQAEGSLAKATTAPATTRNTGRGGEEKKKEKEKEEQEERET

SEQ ID NO: 211 - protein, 57 aa, synthetic construct
  REGION 1..57: note = Synthetic Peptide
EGSLAKATTAPATTRNTGRGGEEKKKEKEKEEQEERETKTPECPSHTQPLGVYLLTP

SEQ ID NO: 212 - protein, 57 aa, synthetic construct
  REGION 1..57: note = Synthetic Peptide
AEGSLAKATTAPATTRNTGRGGEEKKKEKEKEEQEERETKTPECPSHTQPLGVYLLT

SEQ ID NO: 213 - protein, 57 aa, synthetic construct
  REGION 1..57: note = Synthetic Peptide
QAEGSLAKATTAPATTRNTGRGGEEKKKEKEKEEQEERETKTPECPSHTQPLGVYLL

SEQ ID NO: 214 - protein, 57 aa, synthetic construct
  REGION 1..57: note = Synthetic Peptide
PQAEGSLAKATTAPATTRNTGRGGEEKKKEKEKEEQEERETKTPECPSHTQPLGVYL

SEQ ID NO: 215 - protein, 57 aa, synthetic construct
  REGION 1..57: note = Synthetic Peptide
QPQAEGSLAKATTAPATTRNTGRGGEEKKKEKEKEEQEERETKTPECPSHTQPLGVY

SEQ ID NO: 216 - protein, 57 aa, synthetic construct
  REGION 1..57: note = Synthetic Peptide
AQPQAEGSLAKATTAPATTRNTGRGGEEKKKEKEKEEQEERETKTPECPSHTQPLGV

SEQ ID NO: 217 - protein, 57 aa, synthetic construct
  REGION 1..57: note = Synthetic Peptide
TAQPQAEGSLAKATTAPATTRNTGRGGEEKKKEKEKEEQEERETKTPECPSHTQPLG

SEQ ID NO: 218 - protein, 57 aa, synthetic construct
  REGION 1..57: note = Synthetic Peptide
PTAQPQAEGSLAKATTAPATTRNTGRGGEEKKKEKEKEEQEERETKTPECPSHTQPL

SEQ ID NO: 219 - protein, 57 aa, synthetic construct
  REGION 1..57: note = Synthetic Peptide
VPTAQPQAEGSLAKATTAPATTRNTGRGGEEKKKEKEKEEQEERETKTPECPSHTQP

SEQ ID NO: 220 - protein, 57 aa, synthetic construct
  REGION 1..57: note = Synthetic Peptide
SVPTAQPQAEGSLAKATTAPATTRNTGRGGEEKKKEKEKEEQEERETKTPECPSHTQ

SEQ ID NO: 221 - protein, 57 aa, synthetic construct
  REGION 1..57: note = Synthetic Peptide
SSVPTAQPQAEGSLAKATTAPATTRNTGRGGEEKKKEKEKEEQEERETKTPECPSHT

SEQ ID NO: 222 - protein, 57 aa, synthetic construct
  REGION 1..57: note = Synthetic Peptide
ASSVPTAQPQAEGSLAKATTAPATTRNTGRGGEEKKKEKEKEEQEERETKTPECPSH

SEQ ID NO: 223 - protein, 57 aa, synthetic construct
  REGION 1..57: note = Synthetic Peptide
QASSVPTAQPQAEGSLAKATTAPATTRNTGRGGEEKKKEKEKEEQEERETKTPECPS

SEQ ID NO: 224 - protein, 57 aa, synthetic construct
  REGION 1..57: note = Synthetic Peptide
AQASSVPTAQPQAEGSLAKATTAPATTRNTGRGGEEKKKEKEKEEQEERETKTPECP

SEQ ID NO: 225 - protein, 57 aa, synthetic construct
  REGION 1..57: note = Synthetic Peptide
KAQASSVPTAQPQAEGSLAKATTAPATTRNTGRGGEEKKKEKEKEEQEERETKTPEC

SEQ ID NO: 226 - protein, 57 aa, synthetic construct
  REGION 1..57: note = Synthetic Peptide
PKAQASSVPTAQPQAEGSLAKATTAPATTRNTGRGGEEKKKEKEKEEQEERETKTPE

SEQ ID NO: 227 - protein, 57 aa, synthetic construct
  REGION 1..57: note = Synthetic Peptide
SPKAQASSVPTAQPQAEGSLAKATTAPATTRNTGRGGEEKKKEKEKEEQEERETKTP

SEQ ID NO: 228 - protein, 57 aa, synthetic construct
  REGION 1..57: note = Synthetic Peptide
ESPKAQASSVPTAQPQAEGSLAKATTAPATTRNTGRGGEEKKKEKEKEEQEERETKT

SEQ ID NO: 229 - protein, 57 aa, synthetic construct
  REGION 1..57: note = Synthetic Peptide
PESPKAQASSVPTAQPQAEGSLAKATTAPATTRNTGRGGEEKKKEKEKEEQEERETK

SEQ ID NO: 230 - protein, 57 aa, synthetic construct
  REGION 1..57: note = Synthetic Peptide
WPESPKAQASSVPTAQPQAEGSLAKATTAPATTRNTGRGGEEKKKEKEKEEQEERET

SEQ ID NO: 231 - protein, 57 aa, synthetic construct
  REGION 1..57: note = Synthetic Peptide
RWPESPKAQASSVPTAQPQAEGSLAKATTAPATTRNTGRGGEEKKKEKEKEEQEERE

SEQ ID NO: 232 - protein, 56 aa, synthetic construct
  REGION 1..56: note = Synthetic Peptide
GSLAKATTAPATTRNTGRGGEEKKKEKEKEEQEERETKTPECPSHTQPLGVYLLTP

SEQ ID NO: 233 - protein, 56 aa, synthetic construct
  REGION 1..56: note = Synthetic Peptide
EGSLAKATTAPATTRNTGRGGEEKKKEKEKEEQEERETKTPECPSHTQPLGVYLLT

SEQ ID NO: 234 - protein, 56 aa, synthetic construct
  REGION 1..56: note = Synthetic Peptide
AEGSLAKATTAPATTRNTGRGGEEKKKEKEKEEQEERETKTPECPSHTQPLGVYLL

SEQ ID NO: 235 - protein, 56 aa, synthetic construct
  REGION 1..56: note = Synthetic Peptide
QAEGSLAKATTAPATTRNTGRGGEEKKKEKEKEEQEERETKTPECPSHTQPLGVYL

SEQ ID NO: 236 - protein, 56 aa, synthetic construct
  REGION 1..56: note = Synthetic Peptide
PQAEGSLAKATTAPATTRNTGRGGEEKKKEKEKEEQEERETKTPECPSHTQPLGVY

SEQ ID NO: 237 - protein, 56 aa, synthetic construct
  REGION 1..56: note = Synthetic Peptide
QPQAEGSLAKATTAPATTRNTGRGGEEKKKEKEKEEQEERETKTPECPSHTQPLGV

SEQ ID NO: 238 - protein, 56 aa, synthetic construct
  REGION 1..56: note = Synthetic Peptide
AQPQAEGSLAKATTAPATTRNTGRGGEEKKKEKEKEEQEERETKTPECPSHTQPLG

SEQ ID NO: 239 - protein, 56 aa, synthetic construct
  REGION 1..56: note = Synthetic Peptide
TAQPQAEGSLAKATTAPATTRNTGRGGEEKKKEKEKEEQEERETKTPECPSHTQPL

SEQ ID NO: 240 - protein, 56 aa, synthetic construct
  REGION 1..56: note = Synthetic Peptide
PTAQPQAEGSLAKATTAPATTRNTGRGGEEKKKEKEKEEQEERETKTPECPSHTQP

SEQ ID NO: 241 - protein, 56 aa, synthetic construct
  REGION 1..56: note = Synthetic Peptide
VPTAQPQAEGSLAKATTAPATTRNTGRGGEEKKKEKEKEEQEERETKTPECPSHTQ

SEQ ID NO: 242 - protein, 56 aa, synthetic construct
  REGION 1..56: note = Synthetic Peptide
SVPTAQPQAEGSLAKATTAPATTRNTGRGGEEKKKEKEKEEQEERETKTPECPSHT

SEQ ID NO: 243 - protein, 56 aa, synthetic construct
  REGION 1..56: note = Synthetic Peptide
SSVPTAQPQAEGSLAKATTAPATTRNTGRGGEEKKKEKEKEEQEERETKTPECPSH

SEQ ID NO: 244 - protein, 56 aa, synthetic construct
  REGION 1..56: note = Synthetic Peptide
ASSVPTAQPQAEGSLAKATTAPATTRNTGRGGEEKKKEKEKEEQEERETKTPECPS

SEQ ID NO: 245 - protein, 56 aa, synthetic construct
  REGION 1..56: note = Synthetic Peptide
QASSVPTAQPQAEGSLAKATTAPATTRNTGRGGEEKKKEKEKEEQEERETKTPECP

SEQ ID NO: 246 - protein, 56 aa, synthetic construct
  REGION 1..56: note = Synthetic Peptide
AQASSVPTAQPQAEGSLAKATTAPATTRNTGRGGEEKKKEKEKEEQEERETKTPEC

SEQ ID NO: 247 - protein, 56 aa, synthetic construct
  REGION 1..56: note = Synthetic Peptide
KAQASSVPTAQPQAEGSLAKATTAPATTRNTGRGGEEKKKEKEKEEQEERETKTPE

SEQ ID NO: 248 - protein, 56 aa, synthetic construct
  REGION 1..56: note = Synthetic Peptide
PKAQASSVPTAQPQAEGSLAKATTAPATTRNTGRGGEEKKKEKEKEEQEERETKTP

SEQ ID NO: 249 - protein, 56 aa, synthetic construct
  REGION 1..56: note = Synthetic Peptide
SPKAQASSVPTAQPQAEGSLAKATTAPATTRNTGRGGEEKKKEKEKEEQEERETKT

SEQ ID NO: 250 - protein, 56 aa, synthetic construct
  REGION 1..56: note = Synthetic Peptide
ESPKAQASSVPTAQPQAEGSLAKATTAPATTRNTGRGGEEKKKEKEKEEQEERETK

SEQ ID NO: 251 - protein, 56 aa, synthetic construct
  REGION 1..56: note = Synthetic Peptide
PESPKAQASSVPTAQPQAEGSLAKATTAPATTRNTGRGGEEKKKEKEKEEQEERET

SEQ ID NO: 252 - protein, 56 aa, synthetic construct
  REGION 1..56: note = Synthetic Peptide
WPESPKAQASSVPTAQPQAEGSLAKATTAPATTRNTGRGGEEKKKEKEKEEQEERE

SEQ ID NO: 253 - protein, 56 aa, synthetic construct
  REGION 1..56: note = Synthetic Peptide
RWPESPKAQASSVPTAQPQAEGSLAKATTAPATTRNTGRGGEEKKKEKEKEEQEER

SEQ ID NO: 254 - protein, 55 aa, synthetic construct
  REGION 1..55: note = Synthetic Peptide
SLAKATTAPATTRNTGRGGEEKKKEKEKEEQEERETKTPECPSHTQPLGVYLLTP

SEQ ID NO: 255 - protein, 55 aa, synthetic construct
  REGION 1..55: note = Synthetic Peptide
GSLAKATTAPATTRNTGRGGEEKKKEKEKEEQEERETKTPECPSHTQPLGVYLLT

SEQ ID NO: 256 - protein, 55 aa, synthetic construct
  REGION 1..55: note = Synthetic Peptide
EGSLAKATTAPATTRNTGRGGEEKKKEKEKEEQEERETKTPECPSHTQPLGVYLL

SEQ ID NO: 257 - protein, 55 aa, synthetic construct
  REGION 1..55: note = Synthetic Peptide
AEGSLAKATTAPATTRNTGRGGEEKKKEKEKEEQEERETKTPECPSHTQPLGVYL

SEQ ID NO: 258 - protein, 55 aa, synthetic construct
  REGION 1..55: note = Synthetic Peptide
QAEGSLAKATTAPATTRNTGRGGEEKKKEKEKEEQEERETKTPECPSHTQPLGVY

SEQ ID NO: 259 - protein, 55 aa, synthetic construct
  REGION 1..55: note = Synthetic Peptide
PQAEGSLAKATTAPATTRNTGRGGEEKKKEKEKEEQEERETKTPECPSHTQPLGV

SEQ ID NO: 260 - protein, 55 aa, synthetic construct
  REGION 1..55: note = Synthetic Peptide
QPQAEGSLAKATTAPATTRNTGRGGEEKKKEKEKEEQEERETKTPECPSHTQPLG

SEQ ID NO: 261 - protein, 55 aa, synthetic construct
  REGION 1..55: note = Synthetic Peptide
AQPQAEGSLAKATTAPATTRNTGRGGEEKKKEKEKEEQEERETKTPECPSHTQPL

SEQ ID NO: 262 - protein, 55 aa, synthetic construct
  REGION 1..55: note = Synthetic Peptide
TAQPQAEGSLAKATTAPATTRNTGRGGEEKKKEKEKEEQEERETKTPECPSHTQP

SEQ ID NO: 263 - protein, 55 aa, synthetic construct
  REGION 1..55: note = Synthetic Peptide
PTAQPQAEGSLAKATTAPATTRNTGRGGEEKKKEKEKEEQEERETKTPECPSHTQ

SEQ ID NO: 264 - protein, 55 aa, synthetic construct
  REGION 1..55: note = Synthetic Peptide
VPTAQPQAEGSLAKATTAPATTRNTGRGGEEKKKEKEKEEQEERETKTPECPSHT

SEQ ID NO: 265 - protein, 55 aa, synthetic construct
  REGION 1..55: note = Synthetic Peptide
SVPTAQPQAEGSLAKATTAPATTRNTGRGGEEKKKEKEKEEQEERETKTPECPSH

SEQ ID NO: 266 - protein, 55 aa, synthetic construct
  REGION 1..55: note = Synthetic Peptide
SSVPTAQPQAEGSLAKATTAPATTRNTGRGGEEKKKEKEKEEQEERETKTPECPS

SEQ ID NO: 267 - protein, 55 aa, synthetic construct
  REGION 1..55: note = Synthetic Peptide
ASSVPTAQPQAEGSLAKATTAPATTRNTGRGGEEKKKEKEKEEQEERETKTPECP

SEQ ID NO: 268 - protein, 55 aa, synthetic construct
  REGION 1..55: note = Synthetic Peptide
QASSVPTAQPQAEGSLAKATTAPATTRNTGRGGEEKKKEKEKEEQEERETKTPEC

SEQ ID NO: 269 - protein, 55 aa, synthetic construct
  REGION 1..55: note = Synthetic Peptide
AQASSVPTAQPQAEGSLAKATTAPATTRNTGRGGEEKKKEKEKEEQEERETKTPE

SEQ ID NO: 270 - protein, 55 aa, synthetic construct
  REGION 1..55: note = Synthetic Peptide
KAQASSVPTAQPQAEGSLAKATTAPATTRNTGRGGEEKKKEKEKEEQEERETKTP

SEQ ID NO: 271 - protein, 55 aa, synthetic construct
  REGION 1..55: note = Synthetic Peptide
PKAQASSVPTAQPQAEGSLAKATTAPATTRNTGRGGEEKKKEKEKEEQEERETKT

SEQ ID NO: 272 - protein, 55 aa, synthetic construct
  REGION 1..55: note = Synthetic Peptide
SPKAQASSVPTAQPQAEGSLAKATTAPATTRNTGRGGEEKKKEKEKEEQEERETK

SEQ ID NO: 273 - protein, 55 aa, synthetic construct
  REGION 1..55: note = Synthetic Peptide
ESPKAQASSVPTAQPQAEGSLAKATTAPATTRNTGRGGEEKKKEKEKEEQEERET

SEQ ID NO: 274 - protein, 55 aa, synthetic construct
  REGION 1..55: note = Synthetic Peptide
PESPKAQASSVPTAQPQAEGSLAKATTAPATTRNTGRGGEEKKKEKEKEEQEERE

SEQ ID NO: 275 - protein, 55 aa, synthetic construct
  REGION 1..55: note = Synthetic Peptide
WPESPKAQASSVPTAQPQAEGSLAKATTAPATTRNTGRGGEEKKKEKEKEEQEER

SEQ ID NO: 276 - protein, 55 aa, synthetic construct
  REGION 1..55: note = Synthetic Peptide
RWPESPKAQASSVPTAQPQAEGSLAKATTAPATTRNTGRGGEEKKKEKEKEEQEE

SEQ ID NO: 277 - protein, 54 aa, synthetic construct
  REGION 1..54: note = Synthetic Peptide
LAKATTAPATTRNTGRGGEEKKKEKEKEEQEERETKTPECPSHTQPLGVYLLTP

SEQ ID NO: 278 - protein, 54 aa, synthetic construct
  REGION 1..54: note = Synthetic Peptide
SLAKATTAPATTRNTGRGGEEKKKEKEKEEQEERETKTPECPSHTQPLGVYLLT

SEQ ID NO: 279 - protein, 54 aa, synthetic construct
  REGION 1..54: note = Synthetic Peptide
GSLAKATTAPATTRNTGRGGEEKKKEKEKEEQEERETKTPECPSHTQPLGVYLL

SEQ ID NO: 280 - protein, 54 aa, synthetic construct
  REGION 1..54: note = Synthetic Peptide
EGSLAKATTAPATTRNTGRGGEEKKKEKEKEEQEERETKTPECPSHTQPLGVYL

SEQ ID NO: 281 - protein, 54 aa, synthetic construct
  REGION 1..54: note = Synthetic Peptide
AEGSLAKATTAPATTRNTGRGGEEKKKEKEKEEQEERETKTPECPSHTQPLGVY

SEQ ID NO: 282 - protein, 54 aa, synthetic construct
  REGION 1..54: note = Synthetic Peptide
QAEGSLAKATTAPATTRNTGRGGEEKKKEKEKEEQEERETKTPECPSHTQPLGV

SEQ ID NO: 283 - protein, 54 aa, synthetic construct
  REGION 1..54: note = Synthetic Peptide
PQAEGSLAKATTAPATTRNTGRGGEEKKKEKEKEEQEERETKTPECPSHTQPLG

SEQ ID NO: 284 - protein, 54 aa, synthetic construct
  REGION 1..54: note = Synthetic Peptide
QPQAEGSLAKATTAPATTRNTGRGGEEKKKEKEKEEQEERETKTPECPSHTQPL

SEQ ID NO: 285 - protein, 54 aa, synthetic construct
  REGION 1..54: note = Synthetic Peptide
AQPQAEGSLAKATTAPATTRNTGRGGEEKKKEKEKEEQEERETKTPECPSHTQP

SEQ ID NO: 286 - protein, 54 aa, synthetic construct
  REGION 1..54: note = Synthetic Peptide
TAQPQAEGSLAKATTAPATTRNTGRGGEEKKKEKEKEEQEERETKTPECPSHTQ

SEQ ID NO: 287 - protein, 54 aa, synthetic construct
  REGION 1..54: note = Synthetic Peptide
PTAQPQAEGSLAKATTAPATTRNTGRGGEEKKKEKEKEEQEERETKTPECPSHT

SEQ ID NO: 288 - protein, 54 aa, synthetic construct
  REGION 1..54: note = Synthetic Peptide
VPTAQPQAEGSLAKATTAPATTRNTGRGGEEKKKEKEKEEQEERETKTPECPSH

SEQ ID NO: 289 - protein, 54 aa, synthetic construct
  REGION 1..54: note = Synthetic Peptide
SVPTAQPQAEGSLAKATTAPATTRNTGRGGEEKKKEKEKEEQEERETKTPECPS

SEQ ID NO: 290 - protein, 54 aa, synthetic construct
  REGION 1..54: note = Synthetic Peptide
SSVPTAQPQAEGSLAKATTAPATTRNTGRGGEEKKKEKEKEEQEERETKTPECP

SEQ ID NO: 291 - protein, 54 aa, synthetic construct
  REGION 1..54: note = Synthetic Peptide
ASSVPTAQPQAEGSLAKATTAPATTRNTGRGGEEKKKEKEKEEQEERETKTPEC

SEQ ID NO: 292 - protein, 54 aa, synthetic construct
  REGION 1..54: note = Synthetic Peptide
QASSVPTAQPQAEGSLAKATTAPATTRNTGRGGEEKKKEKEKEEQEERETKTPE

SEQ ID NO: 293 - protein, 54 aa, synthetic construct
  REGION 1..54: note = Synthetic Peptide
AQASSVPTAQPQAEGSLAKATTAPATTRNTGRGGEEKKKEKEKEEQEERETKTP

SEQ ID NO: 294 - protein, 54 aa, synthetic construct
  REGION 1..54: note = Synthetic Peptide
KAQASSVPTAQPQAEGSLAKATTAPATTRNTGRGGEEKKKEKEKEEQEERETKT

SEQ ID NO: 295 - protein, 54 aa, synthetic construct
  REGION 1..54: note = Synthetic Peptide
PKAQASSVPTAQPQAEGSLAKATTAPATTRNTGRGGEEKKKEKEKEEQEERETK

SEQ ID NO: 296 - protein, 54 aa, synthetic construct
  REGION 1..54: note = Synthetic Peptide
SPKAQASSVPTAQPQAEGSLAKATTAPATTRNTGRGGEEKKKEKEKEEQEERET

SEQ ID NO: 297 - protein, 54 aa, synthetic construct
  REGION 1..54: note = Synthetic Peptide
ESPKAQASSVPTAQPQAEGSLAKATTAPATTRNTGRGGEEKKKEKEKEEQEERE

SEQ ID NO: 298 - protein, 54 aa, synthetic construct
  REGION 1..54: note = Synthetic Peptide
PESPKAQASSVPTAQPQAEGSLAKATTAPATTRNTGRGGEEKKKEKEKEEQEER

SEQ ID NO: 299 - protein, 54 aa, synthetic construct
  REGION 1..54: note = Synthetic Peptide
WPESPKAQASSVPTAQPQAEGSLAKATTAPATTRNTGRGGEEKKKEKEKEEQEE

SEQ ID NO: 300 - protein, 54 aa, synthetic construct
  REGION 1..54: note = Synthetic Peptide
RWPESPKAQASSVPTAQPQAEGSLAKATTAPATTRNTGRGGEEKKKEKEKEEQE

SEQ ID NO: 301 - protein, 53 aa, synthetic construct
  REGION 1..53: note = Synthetic Peptide
AKATTAPATTRNTGRGGEEKKKEKEKEEQEERETKTPECPSHTQPLGVYLLTP

SEQ ID NO: 302 - protein, 53 aa, synthetic construct
  REGION 1..53: note = Synthetic Peptide
LAKATTAPATTRNTGRGGEEKKKEKEKEEQEERETKTPECPSHTQPLGVYLLT

SEQ ID NO: 303 - protein, 53 aa, synthetic construct
  REGION 1..53: note = Synthetic Peptide
SLAKATTAPATTRNTGRGGEEKKKEKEKEEQEERETKTPECPSHTQPLGVYLL

SEQ ID NO: 304 - protein, 53 aa, synthetic construct
  REGION 1..53: note = Synthetic Peptide
GSLAKATTAPATTRNTGRGGEEKKKEKEKEEQEERETKTPECPSHTQPLGVYL

SEQ ID NO: 305 - protein, 53 aa, synthetic construct
  REGION 1..53: note = Synthetic Peptide
EGSLAKATTAPATTRNTGRGGEEKKKEKEKEEQEERETKTPECPSHTQPLGVY

SEQ ID NO: 306 - protein, 53 aa, synthetic construct
  REGION 1..53: note = Synthetic Peptide
AEGSLAKATTAPATTRNTGRGGEEKKKEKEKEEQEERETKTPECPSHTQPLGV

SEQ ID NO: 307 - protein, 53 aa, synthetic construct
  REGION 1..53: note = Synthetic Peptide
QAEGSLAKATTAPATTRNTGRGGEEKKKEKEKEEQEERETKTPECPSHTQPLG

SEQ ID NO: 308 - protein, 53 aa, synthetic construct
  REGION 1..53: note = Synthetic Peptide
PQAEGSLAKATTAPATTRNTGRGGEEKKKEKEKEEQEERETKTPECPSHTQPL

SEQ ID NO: 309 - protein, 53 aa, synthetic construct
  REGION 1..53: note = Synthetic Peptide
QPQAEGSLAKATTAPATTRNTGRGGEEKKKEKEKEEQEERETKTPECPSHTQP

SEQ ID NO: 310 - protein, 53 aa, synthetic construct
  REGION 1..53: note = Synthetic Peptide
AQPQAEGSLAKATTAPATTRNTGRGGEEKKKEKEKEEQEERETKTPECPSHTQ

SEQ ID NO: 311 - protein, 53 aa, synthetic construct
  REGION 1..53: note = Synthetic Peptide
TAQPQAEGSLAKATTAPATTRNTGRGGEEKKKEKEKEEQEERETKTPECPSHT

SEQ ID NO: 312 - protein, 53 aa, synthetic construct
  REGION 1..53: note = Synthetic Peptide
PTAQPQAEGSLAKATTAPATTRNTGRGGEEKKKEKEKEEQEERETKTPECPSH

SEQ ID NO: 313 - protein, 53 aa, synthetic construct
  REGION 1..53: note = Synthetic Peptide
VPTAQPQAEGSLAKATTAPATTRNTGRGGEEKKKEKEKEEQEERETKTPECPS

SEQ ID NO: 314 - protein, 53 aa, synthetic construct
  REGION 1..53: note = Synthetic Peptide
SVPTAQPQAEGSLAKATTAPATTRNTGRGGEEKKKEKEKEEQEERETKTPECP

SEQ ID NO: 315 - protein, 53 aa, synthetic construct
  REGION 1..53: note = Synthetic Peptide
SSVPTAQPQAEGSLAKATTAPATTRNTGRGGEEKKKEKEKEEQEERETKTPEC

SEQ ID NO: 316 - protein, 53 aa, synthetic construct
  REGION 1..53: note = Synthetic Peptide
ASSVPTAQPQAEGSLAKATTAPATTRNTGRGGEEKKKEKEKEEQEERETKTPE

SEQ ID NO: 317 - protein, 53 aa, synthetic construct
  REGION 1..53: note = Synthetic Peptide
QASSVPTAQPQAEGSLAKATTAPATTRNTGRGGEEKKKEKEKEEQEERETKTP

SEQ ID NO: 318 - protein, 53 aa, synthetic construct
  REGION 1..53: note = Synthetic Peptide
AQASSVPTAQPQAEGSLAKATTAPATTRNTGRGGEEKKKEKEKEEQEERETKT

SEQ ID NO: 319 - protein, 53 aa, synthetic construct
  REGION 1..53: note = Synthetic Peptide
KAQASSVPTAQPQAEGSLAKATTAPATTRNTGRGGEEKKKEKEKEEQEERETK

SEQ ID NO: 320 - protein, 53 aa, synthetic construct
  REGION 1..53: note = Synthetic Peptide
PKAQASSVPTAQPQAEGSLAKATTAPATTRNTGRGGEEKKKEKEKEEQEERET

SEQ ID NO: 321 - protein, 53 aa, synthetic construct
  REGION 1..53: note = Synthetic Peptide
SPKAQASSVPTAQPQAEGSLAKATTAPATTRNTGRGGEEKKKEKEKEEQEERE

SEQ ID NO: 322 - protein, 53 aa, synthetic construct
  REGION 1..53: note = Synthetic Peptide
ESPKAQASSVPTAQPQAEGSLAKATTAPATTRNTGRGGEEKKKEKEKEEQEER

SEQ ID NO: 323 - protein, 53 aa, synthetic construct
  REGION 1..53: note = Synthetic Peptide
PESPKAQASSVPTAQPQAEGSLAKATTAPATTRNTGRGGEEKKKEKEKEEQEE

SEQ ID NO: 324 - protein, 53 aa, synthetic construct
  REGION 1..53: note = Synthetic Peptide
WPESPKAQASSVPTAQPQAEGSLAKATTAPATTRNTGRGGEEKKKEKEKEEQE

SEQ ID NO: 325 - protein, 53 aa, synthetic construct
  REGION 1..53: note = Synthetic Peptide
RWPESPKAQASSVPTAQPQAEGSLAKATTAPATTRNTGRGGEEKKKEKEKEEQ

SEQ ID NO: 326 - protein, 52 aa, synthetic construct
  REGION 1..52: note = Synthetic Peptide
KATTAPATTRNTGRGGEEKKKEKEKEEQEERETKTPECPSHTQPLGVYLLTP

SEQ ID NO: 327 - protein, 52 aa, synthetic construct
  REGION 1..52: note = Synthetic Peptide
AKATTAPATTRNTGRGGEEKKKEKEKEEQEERETKTPECPSHTQPLGVYLLT

SEQ ID NO: 328 - protein, 52 aa, synthetic construct
  REGION 1..52: note = Synthetic Peptide
LAKATTAPATTRNTGRGGEEKKKEKEKEEQEERETKTPECPSHTQPLGVYLL

SEQ ID NO: 329 - protein, 52 aa, synthetic construct
  REGION 1..52: note = Synthetic Peptide
SLAKATTAPATTRNTGRGGEEKKKEKEKEEQEERETKTPECPSHTQPLGVYL

SEQ ID NO: 330 - protein, 52 aa, synthetic construct
  REGION 1..52: note = Synthetic Peptide
GSLAKATTAPATTRNTGRGGEEKKKEKEKEEQEERETKTPECPSHTQPLGVY

SEQ ID NO: 331 - protein, 52 aa, synthetic construct
  REGION 1..52: note = Synthetic Peptide
EGSLAKATTAPATTRNTGRGGEEKKKEKEKEEQEERETKTPECPSHTQPLGV

SEQ ID NO: 332 - protein, 52 aa, synthetic construct
  REGION 1..52: note = Synthetic Peptide
AEGSLAKATTAPATTRNTGRGGEEKKKEKEKEEQEERETKTPECPSHTQPLG

SEQ ID NO: 333 - protein, 52 aa, synthetic construct
  REGION 1..52: note = Synthetic Peptide
QAEGSLAKATTAPATTRNTGRGGEEKKKEKEKEEQEERETKTPECPSHTQPL

SEQ ID NO: 334 - protein, 52 aa, synthetic construct
  REGION 1..52: note = Synthetic Peptide
PQAEGSLAKATTAPATTRNTGRGGEEKKKEKEKEEQEERETKTPECPSHTQP

SEQ ID NO: 335 - protein, 52 aa, synthetic construct
  REGION 1..52: note = Synthetic Peptide
QPQAEGSLAKATTAPATTRNTGRGGEEKKKEKEKEEQEERETKTPECPSHTQ

SEQ ID NO: 336 - protein, 52 aa, synthetic construct
  REGION 1..52: note = Synthetic Peptide
AQPQAEGSLAKATTAPATTRNTGRGGEEKKKEKEKEEQEERETKTPECPSHT

SEQ ID NO: 337 - protein, 52 aa, synthetic construct
  REGION 1..52: note = Synthetic Peptide
TAQPQAEGSLAKATTAPATTRNTGRGGEEKKKEKEKEEQEERETKTPECPSH

SEQ ID NO: 338 - protein, 52 aa, synthetic construct
  REGION 1..52: note = Synthetic Peptide
PTAQPQAEGSLAKATTAPATTRNTGRGGEEKKKEKEKEEQEERETKTPECPS

SEQ ID NO: 339 - protein, 52 aa, synthetic construct
  REGION 1..52: note = Synthetic Peptide
VPTAQPQAEGSLAKATTAPATTRNTGRGGEEKKKEKEKEEQEERETKTPECP

SEQ ID NO: 340 - protein, 52 aa, synthetic construct
  REGION 1..52: note = Synthetic Peptide
SVPTAQPQAEGSLAKATTAPATTRNTGRGGEEKKKEKEKEEQEERETKTPEC

SEQ ID NO: 341 - protein, 52 aa, synthetic construct
  REGION 1..52: note = Synthetic Peptide
SSVPTAQPQAEGSLAKATTAPATTRNTGRGGEEKKKEKEKEEQEERETKTPE

SEQ ID NO: 342 - protein, 52 aa, synthetic construct
  REGION 1..52: note = Synthetic Peptide
ASSVPTAQPQAEGSLAKATTAPATTRNTGRGGEEKKKEKEKEEQEERETKTP

SEQ ID NO: 343 - protein, 52 aa, synthetic construct
  REGION 1..52: note = Synthetic Peptide
QASSVPTAQPQAEGSLAKATTAPATTRNTGRGGEEKKKEKEKEEQEERETKT

SEQ ID NO: 344 - protein, 52 aa, synthetic construct
  REGION 1..52: note = Synthetic Peptide
AQASSVPTAQPQAEGSLAKATTAPATTRNTGRGGEEKKKEKEKEEQEERETK

SEQ ID NO: 345 - protein, 52 aa, synthetic construct
  REGION 1..52: note = Synthetic Peptide
KAQASSVPTAQPQAEGSLAKATTAPATTRNTGRGGEEKKKEKEKEEQEERET

SEQ ID NO: 346 - protein, 52 aa, synthetic construct
  REGION 1..52: note = Synthetic Peptide
PKAQASSVPTAQPQAEGSLAKATTAPATTRNTGRGGEEKKKEKEKEEQEERE

SEQ ID NO: 347 - protein, 52 aa, synthetic construct
  REGION 1..52: note = Synthetic Peptide
SPKAQASSVPTAQPQAEGSLAKATTAPATTRNTGRGGEEKKKEKEKEEQEER

SEQ ID NO: 348 - protein, 52 aa, synthetic construct
  REGION 1..52: note = Synthetic Peptide
ESPKAQASSVPTAQPQAEGSLAKATTAPATTRNTGRGGEEKKKEKEKEEQEE

SEQ ID NO: 349 - protein, 52 aa, synthetic construct
  REGION 1..52: note = Synthetic Peptide
PESPKAQASSVPTAQPQAEGSLAKATTAPATTRNTGRGGEEKKKEKEKEEQE

SEQ ID NO: 350 - protein, 52 aa, synthetic construct
  REGION 1..52: note = Synthetic Peptide
WPESPKAQASSVPTAQPQAEGSLAKATTAPATTRNTGRGGEEKKKEKEKEEQ

SEQ ID NO: 351 - protein, 52 aa, synthetic construct
  REGION 1..52: note = Synthetic Peptide
RWPESPKAQASSVPTAQPQAEGSLAKATTAPATTRNTGRGGEEKKKEKEKEE

SEQ ID NO: 352 - protein, 51 aa, synthetic construct
  REGION 1..51: note = Synthetic Peptide
ATTAPATTRNTGRGGEEKKKEKEKEEQEERETKTPECPSHTQPLGVYLLTP

SEQ ID NO: 353 - protein, 51 aa, synthetic construct
  REGION 1..51: note = Synthetic Peptide
KATTAPATTRNTGRGGEEKKKEKEKEEQEERETKTPECPSHTQPLGVYLLT

SEQ ID NO: 354 - protein, 51 aa, synthetic construct
  REGION 1..51: note = Synthetic Peptide
AKATTAPATTRNTGRGGEEKKKEKEKEEQEERETKTPECPSHTQPLGVYLL

SEQ ID NO: 355 - protein, 51 aa, synthetic construct
  REGION 1..51: note = Synthetic Peptide
LAKATTAPATTRNTGRGGEEKKKEKEKEEQEERETKTPECPSHTQPLGVYL

SEQ ID NO: 356 - protein, 51 aa, synthetic construct
  REGION 1..51: note = Synthetic Peptide
SLAKATTAPATTRNTGRGGEEKKKEKEKEEQEERETKTPECPSHTQPLGVY

SEQ ID NO: 357 - protein, 51 aa, synthetic construct
  REGION 1..51: note = Synthetic Peptide
GSLAKATTAPATTRNTGRGGEEKKKEKEKEEQEERETKTPECPSHTQPLGV

SEQ ID NO: 358 - protein, 51 aa, synthetic construct
  REGION 1..51: note = Synthetic Peptide
EGSLAKATTAPATTRNTGRGGEEKKKEKEKEEQEERETKTPECPSHTQPLG

SEQ ID NO: 359 - protein, 51 aa, synthetic construct
  REGION 1..51: note = Synthetic Peptide
AEGSLAKATTAPATTRNTGRGGEEKKKEKEKEEQEERETKTPECPSHTQPL

SEQ ID NO: 360 - protein, 51 aa, synthetic construct
  REGION 1..51: note = Synthetic Peptide
QAEGSLAKATTAPATTRNTGRGGEEKKKEKEKEEQEERETKTPECPSHTQP

SEQ ID NO: 361 - protein, 51 aa, synthetic construct
  REGION 1..51: note = Synthetic Peptide
PQAEGSLAKATTAPATTRNTGRGGEEKKKEKEKEEQEERETKTPECPSHTQ

SEQ ID NO: 362 - protein, 51 aa, synthetic construct
  REGION 1..51: note = Synthetic Peptide
QPQAEGSLAKATTAPATTRNTGRGGEEKKKEKEKEEQEERETKTPECPSHT

SEQ ID NO: 363 - protein, 51 aa, synthetic construct
  REGION 1..51: note = Synthetic Peptide
AQPQAEGSLAKATTAPATTRNTGRGGEEKKKEKEKEEQEERETKTPECPSH

SEQ ID NO: 364 - protein, 51 aa, synthetic construct
  REGION 1..51: note = Synthetic Peptide
TAQPQAEGSLAKATTAPATTRNTGRGGEEKKKEKEKEEQEERETKTPECPS

SEQ ID NO: 365 - protein, 51 aa, synthetic construct
  REGION 1..51: note = Synthetic Peptide
PTAQPQAEGSLAKATTAPATTRNTGRGGEEKKKEKEKEEQEERETKTPECP

SEQ ID NO: 366 - protein, 51 aa, synthetic construct
  REGION 1..51: note = Synthetic Peptide
VPTAQPQAEGSLAKATTAPATTRNTGRGGEEKKKEKEKEEQEERETKTPEC

SEQ ID NO: 367 - protein, 51 aa, synthetic construct
  REGION 1..51: note = Synthetic Peptide
SVPTAQPQAEGSLAKATTAPATTRNTGRGGEEKKKEKEKEEQEERETKTPE

SEQ ID NO: 368 - protein, 51 aa, synthetic construct
  REGION 1..51: note = Synthetic Peptide
SSVPTAQPQAEGSLAKATTAPATTRNTGRGGEEKKKEKEKEEQEERETKTP

SEQ ID NO: 369 - protein, 51 aa, synthetic construct
  REGION 1..51: note = Synthetic Peptide
ASSVPTAQPQAEGSLAKATTAPATTRNTGRGGEEKKKEKEKEEQEERETKT

SEQ ID NO: 370 - protein, 51 aa, synthetic construct
  REGION 1..51: note = Synthetic Peptide
QASSVPTAQPQAEGSLAKATTAPATTRNTGRGGEEKKKEKEKEEQEERETK

SEQ ID NO: 371 - protein, 51 aa, synthetic construct
  REGION 1..51: note = Synthetic Peptide
AQASSVPTAQPQAEGSLAKATTAPATTRNTGRGGEEKKKEKEKEEQEERET

SEQ ID NO: 372 - protein, 51 aa, synthetic construct
  REGION 1..51: note = Synthetic Peptide
KAQASSVPTAQPQAEGSLAKATTAPATTRNTGRGGEEKKKEKEKEEQEERE

SEQ ID NO: 373 - protein, 51 aa, synthetic construct
  REGION 1..51: note = Synthetic Peptide
PKAQASSVPTAQPQAEGSLAKATTAPATTRNTGRGGEEKKKEKEKEEQEER

SEQ ID NO: 374 - protein, 51 aa, synthetic construct
  REGION 1..51: note = Synthetic Peptide
SPKAQASSVPTAQPQAEGSLAKATTAPATTRNTGRGGEEKKKEKEKEEQEE

SEQ ID NO: 375 - protein, 51 aa, synthetic construct
  REGION 1..51: note = Synthetic Peptide
ESPKAQASSVPTAQPQAEGSLAKATTAPATTRNTGRGGEEKKKEKEKEEQE

SEQ ID NO: 376 - protein, 51 aa, synthetic construct
  REGION 1..51: note = Synthetic Peptide
PESPKAQASSVPTAQPQAEGSLAKATTAPATTRNTGRGGEEKKKEKEKEEQ

SEQ ID NO: 377 - protein, 51 aa, synthetic construct
  REGION 1..51: note = Synthetic Peptide
WPESPKAQASSVPTAQPQAEGSLAKATTAPATTRNTGRGGEEKKKEKEKEE

SEQ ID NO: 378 - protein, 51 aa, synthetic construct
  REGION 1..51: note = Synthetic Peptide
RWPESPKAQASSVPTAQPQAEGSLAKATTAPATTRNTGRGGEEKKKEKEKE

SEQ ID NO: 379 - protein, 50 aa, synthetic construct
  REGION 1..50: note = Synthetic Peptide
TTAPATTRNTGRGGEEKKKEKEKEEQEERETKTPECPSHTQPLGVYLLTP

SEQ ID NO: 380 - protein, 50 aa, synthetic construct
  REGION 1..50: note = Synthetic Peptide
ATTAPATTRNTGRGGEEKKKEKEKEEQEERETKTPECPSHTQPLGVYLLT

SEQ ID NO: 381 - protein, 50 aa, synthetic construct
  REGION 1..50: note = Synthetic Peptide
KATTAPATTRNTGRGGEEKKKEKEKEEQEERETKTPECPSHTQPLGVYLL

SEQ ID NO: 382 - protein, 50 aa, synthetic construct
  REGION 1..50: note = Synthetic Peptide
AKATTAPATTRNTGRGGEEKKKEKEKEEQEERETKTPECPSHTQPLGVYL

SEQ ID NO: 383 - protein, 50 aa, synthetic construct
  REGION 1..50: note = Synthetic Peptide
LAKATTAPATTRNTGRGGEEKKKEKEKEEQEERETKTPECPSHTQPLGVY

SEQ ID NO: 384 - protein, 50 aa, synthetic construct
  REGION 1..50: note = Synthetic Peptide
SLAKATTAPATTRNTGRGGEEKKKEKEKEEQEERETKTPECPSHTQPLGV

SEQ ID NO: 385 - protein, 50 aa, synthetic construct
  REGION 1..50: note = Synthetic Peptide
GSLAKATTAPATTRNTGRGGEEKKKEKEKEEQEERETKTPECPSHTQPLG

SEQ ID NO: 386 - protein, 50 aa, synthetic construct
  REGION 1..50: note = Synthetic Peptide
EGSLAKATTAPATTRNTGRGGEEKKKEKEKEEQEERETKTPECPSHTQPL

SEQ ID NO: 387 - protein, 50 aa, synthetic construct
  REGION 1..50: note = Synthetic Peptide
AEGSLAKATTAPATTRNTGRGGEEKKKEKEKEEQEERETKTPECPSHTQP

SEQ ID NO: 388 - protein, 50 aa, synthetic construct
  REGION 1..50: note = Synthetic Peptide
QAEGSLAKATTAPATTRNTGRGGEEKKKEKEKEEQEERETKTPECPSHTQ

SEQ ID NO: 389 - protein, 50 aa, synthetic construct
  REGION 1..50: note = Synthetic Peptide
PQAEGSLAKATTAPATTRNTGRGGEEKKKEKEKEEQEERETKTPECPSHT

SEQ ID NO: 390 - protein, 50 aa, synthetic construct
  REGION 1..50: note = Synthetic Peptide
QPQAEGSLAKATTAPATTRNTGRGGEEKKKEKEKEEQEERETKTPECPSH

SEQ ID NO: 391 - protein, 50 aa, synthetic construct
  REGION 1..50: note = Synthetic Peptide
AQPQAEGSLAKATTAPATTRNTGRGGEEKKKEKEKEEQEERETKTPECPS

SEQ ID NO: 392 - protein, 50 aa, synthetic construct
  REGION 1..50: note = Synthetic Peptide
TAQPQAEGSLAKATTAPATTRNTGRGGEEKKKEKEKEEQEERETKTPECP

SEQ ID NO: 393 - protein, 50 aa, synthetic construct
  REGION 1..50: note = Synthetic Peptide
PTAQPQAEGSLAKATTAPATTRNTGRGGEEKKKEKEKEEQEERETKTPEC

SEQ ID NO: 394 - protein, 50 aa, synthetic construct
  REGION 1..50: note = Synthetic Peptide
VPTAQPQAEGSLAKATTAPATTRNTGRGGEEKKKEKEKEEQEERETKTPE

SEQ ID NO: 395 - protein, 50 aa, synthetic construct
  REGION 1..50: note = Synthetic Peptide
SVPTAQPQAEGSLAKATTAPATTRNTGRGGEEKKKEKEKEEQEERETKTP

SEQ ID NO: 396 - protein, 50 aa, synthetic construct
  REGION 1..50: note = Synthetic Peptide
SSVPTAQPQAEGSLAKATTAPATTRNTGRGGEEKKKEKEKEEQEERETKT

SEQ ID NO: 397 - protein, 50 aa, synthetic construct
  REGION 1..50: note = Synthetic Peptide
ASSVPTAQPQAEGSLAKATTAPATTRNTGRGGEEKKKEKEKEEQEERETK

SEQ ID NO: 398 - protein, 50 aa, synthetic construct
  REGION 1..50: note = Synthetic Peptide
QASSVPTAQPQAEGSLAKATTAPATTRNTGRGGEEKKKEKEKEEQEERET

SEQ ID NO: 399 - protein, 50 aa, synthetic construct
  REGION 1..50: note = Synthetic Peptide
AQASSVPTAQPQAEGSLAKATTAPATTRNTGRGGEEKKKEKEKEEQEERE

SEQ ID NO: 400 - protein, 50 aa, synthetic construct
  REGION 1..50: note = Synthetic Peptide
KAQASSVPTAQPQAEGSLAKATTAPATTRNTGRGGEEKKKEKEKEEQEER

SEQ ID NO: 401 - protein, 50 aa, synthetic construct
  REGION 1..50: note = Synthetic Peptide
PKAQASSVPTAQPQAEGSLAKATTAPATTRNTGRGGEEKKKEKEKEEQEE

SEQ ID NO: 402 - protein, 50 aa, synthetic construct
  REGION 1..50: note = Synthetic Peptide
SPKAQASSVPTAQPQAEGSLAKATTAPATTRNTGRGGEEKKKEKEKEEQE

SEQ ID NO: 403 - protein, 50 aa, synthetic construct
  REGION 1..50: note = Synthetic Peptide
ESPKAQASSVPTAQPQAEGSLAKATTAPATTRNTGRGGEEKKKEKEKEEQ

SEQ ID NO: 404 - protein, 50 aa, synthetic construct
  REGION 1..50: note = Synthetic Peptide
PESPKAQASSVPTAQPQAEGSLAKATTAPATTRNTGRGGEEKKKEKEKEE

SEQ ID NO: 405 - protein, 50 aa, synthetic construct
  REGION 1..50: note = Synthetic Peptide
WPESPKAQASSVPTAQPQAEGSLAKATTAPATTRNTGRGGEEKKKEKEKE

SEQ ID NO: 406 - protein, 50 aa, synthetic construct
  REGION 1..50: note = Synthetic Peptide
RWPESPKAQASSVPTAQPQAEGSLAKATTAPATTRNTGRGGEEKKKEKEK

SEQ ID NO: 407 - protein, 49 aa, synthetic construct
  REGION 1..49: note = Synthetic Peptide
TAPATTRNTGRGGEEKKKEKEKEEQEERETKTPECPSHTQPLGVYLLTP

SEQ ID NO: 408 - protein, 49 aa, synthetic construct
  REGION 1..49: note = Synthetic Peptide
TTAPATTRNTGRGGEEKKKEKEKEEQEERETKTPECPSHTQPLGVYLLT

SEQ ID NO: 409 - protein, 49 aa, synthetic construct
  REGION 1..49: note = Synthetic Peptide
ATTAPATTRNTGRGGEEKKKEKEKEEQEERETKTPECPSHTQPLGVYLL

SEQ ID NO: 410 - protein, 49 aa, synthetic construct
  REGION 1..49: note = Synthetic Peptide
KATTAPATTRNTGRGGEEKKKEKEKEEQEERETKTPECPSHTQPLGVYL

SEQ ID NO: 411 - protein, 49 aa, synthetic construct
  REGION 1..49: note = Synthetic Peptide
AKATTAPATTRNTGRGGEEKKKEKEKEEQEERETKTPECPSHTQPLGVY

SEQ ID NO: 412 - protein, 49 aa, synthetic construct
  REGION 1..49: note = Synthetic Peptide
LAKATTAPATTRNTGRGGEEKKKEKEKEEQEERETKTPECPSHTQPLGV

SEQ ID NO: 413 - protein, 49 aa, synthetic construct
  REGION 1..49: note = Synthetic Peptide
SLAKATTAPATTRNTGRGGEEKKKEKEKEEQEERETKTPECPSHTQPLG

SEQ ID NO: 414 - protein, 49 aa, synthetic construct
  REGION 1..49: note = Synthetic Peptide
GSLAKATTAPATTRNTGRGGEEKKKEKEKEEQEERETKTPECPSHTQPL

SEQ ID NO: 415 - protein, 49 aa, synthetic construct
  REGION 1..49: note = Synthetic Peptide
EGSLAKATTAPATTRNTGRGGEEKKKEKEKEEQEERETKTPECPSHTQP

SEQ ID NO: 416 - protein, 49 aa, synthetic construct
  REGION 1..49: note = Synthetic Peptide
AEGSLAKATTAPATTRNTGRGGEEKKKEKEKEEQEERETKTPECPSHTQ

SEQ ID NO: 417 - protein, 49 aa, synthetic construct
  REGION 1..49: note = Synthetic Peptide
QAEGSLAKATTAPATTRNTGRGGEEKKKEKEKEEQEERETKTPECPSHT

SEQ ID NO: 418 - protein, 49 aa, synthetic construct
  REGION 1..49: note = Synthetic Peptide
PQAEGSLAKATTAPATTRNTGRGGEEKKKEKEKEEQEERETKTPECPSH

SEQ ID NO: 419 - protein, 49 aa, synthetic construct
  REGION 1..49: note = Synthetic Peptide
QPQAEGSLAKATTAPATTRNTGRGGEEKKKEKEKEEQEERETKTPECPS

SEQ ID NO: 420 - protein, 49 aa, synthetic construct
  REGION 1..49: note = Synthetic Peptide
AQPQAEGSLAKATTAPATTRNTGRGGEEKKKEKEKEEQEERETKTPECP

SEQ ID NO: 421 - protein, 49 aa, synthetic construct
  REGION 1..49: note = Synthetic Peptide
TAQPQAEGSLAKATTAPATTRNTGRGGEEKKKEKEKEEQEERETKTPEC

SEQ ID NO: 422 - protein, 49 aa, synthetic construct
  REGION 1..49: note = Synthetic Peptide
PTAQPQAEGSLAKATTAPATTRNTGRGGEEKKKEKEKEEQEERETKTPE

SEQ ID NO: 423 - protein, 49 aa, synthetic construct
  REGION 1..49: note = Synthetic Peptide
VPTAQPQAEGSLAKATTAPATTRNTGRGGEEKKKEKEKEEQEERETKTP

SEQ ID NO: 424 - protein, 49 aa, synthetic construct
  REGION 1..49: note = Synthetic Peptide
SVPTAQPQAEGSLAKATTAPATTRNTGRGGEEKKKEKEKEEQEERETKT

SEQ ID NO: 425 - protein, 49 aa, synthetic construct
  REGION 1..49: note = Synthetic Peptide
SSVPTAQPQAEGSLAKATTAPATTRNTGRGGEEKKKEKEKEEQEERETK

SEQ ID NO: 426 - protein, 49 aa, synthetic construct
  REGION 1..49: note = Synthetic Peptide
ASSVPTAQPQAEGSLAKATTAPATTRNTGRGGEEKKKEKEKEEQEERET

SEQ ID NO: 427 - protein, 49 aa, synthetic construct
  REGION 1..49: note = Synthetic Peptide
QASSVPTAQPQAEGSLAKATTAPATTRNTGRGGEEKKKEKEKEEQEERE

SEQ ID NO: 428 - protein, 49 aa, synthetic construct
  REGION 1..49: note = Synthetic Peptide
AQASSVPTAQPQAEGSLAKATTAPATTRNTGRGGEEKKKEKEKEEQEER

SEQ ID NO: 429 - protein, 49 aa, synthetic construct
  REGION 1..49: note = Synthetic Peptide
KAQASSVPTAQPQAEGSLAKATTAPATTRNTGRGGEEKKKEKEKEEQEE

SEQ ID NO: 430 - protein, 49 aa, synthetic construct
  REGION 1..49: note = Synthetic Peptide
PKAQASSVPTAQPQAEGSLAKATTAPATTRNTGRGGEEKKKEKEKEEQE

SEQ ID NO: 431 - protein, 49 aa, synthetic construct
  REGION 1..49: note = Synthetic Peptide
SPKAQASSVPTAQPQAEGSLAKATTAPATTRNTGRGGEEKKKEKEKEEQ

SEQ ID NO: 432 - protein, 49 aa, synthetic construct
  REGION 1..49: note = Synthetic Peptide
ESPKAQASSVPTAQPQAEGSLAKATTAPATTRNTGRGGEEKKKEKEKEE

SEQ ID NO: 433 - protein, 49 aa, synthetic construct
  REGION 1..49: note = Synthetic Peptide
PESPKAQASSVPTAQPQAEGSLAKATTAPATTRNTGRGGEEKKKEKEKE

SEQ ID NO: 434 - protein, 49 aa, synthetic construct
  REGION 1..49: note = Synthetic Peptide
WPESPKAQASSVPTAQPQAEGSLAKATTAPATTRNTGRGGEEKKKEKEK

SEQ ID NO: 435 - protein, 49 aa, synthetic construct
  REGION 1..49: note = Synthetic Peptide
RWPESPKAQASSVPTAQPQAEGSLAKATTAPATTRNTGRGGEEKKKEKE

SEQ ID NO: 436 - protein, 48 aa, synthetic construct
  REGION 1..48: note = Synthetic Peptide
APATTRNTGRGGEEKKKEKEKEEQEERETKTPECPSHTQPLGVYLLTP

SEQ ID NO: 437 - protein, 48 aa, synthetic construct
  REGION 1..48: note = Synthetic Peptide
TAPATTRNTGRGGEEKKKEKEKEEQEERETKTPECPSHTQPLGVYLLT

SEQ ID NO: 438 - protein, 48 aa, synthetic construct
  REGION 1..48: note = Synthetic Peptide
TTAPATTRNTGRGGEEKKKEKEKEEQEERETKTPECPSHTQPLGVYLL

SEQ ID NO: 439 - protein, 48 aa, synthetic construct
  REGION 1..48: note = Synthetic Peptide
ATTAPATTRNTGRGGEEKKKEKEKEEQEERETKTPECPSHTQPLGVYL

SEQ ID NO: 440 - protein, 48 aa, synthetic construct
  REGION 1..48: note = Synthetic Peptide
KATTAPATTRNTGRGGEEKKKEKEKEEQEERETKTPECPSHTQPLGVY

SEQ ID NO: 441 - protein, 48 aa, synthetic construct
  REGION 1..48: note = Synthetic Peptide
AKATTAPATTRNTGRGGEEKKKEKEKEEQEERETKTPECPSHTQPLGV

SEQ ID NO: 442 - protein, 48 aa, synthetic construct
  REGION 1..48: note = Synthetic Peptide
LAKATTAPATTRNTGRGGEEKKKEKEKEEQEERETKTPECPSHTQPLG

SEQ ID NO: 443 - protein, 48 aa, synthetic construct
  REGION 1..48: note = Synthetic Peptide
SLAKATTAPATTRNTGRGGEEKKKEKEKEEQEERETKTPECPSHTQPL

SEQ ID NO: 444 - protein, 48 aa, synthetic construct
  REGION 1..48: note = Synthetic Peptide
GSLAKATTAPATTRNTGRGGEEKKKEKEKEEQEERETKTPECPSHTQP

SEQ ID NO: 445 - protein, 48 aa, synthetic construct
  REGION 1..48: note = Synthetic Peptide
EGSLAKATTAPATTRNTGRGGEEKKKEKEKEEQEERETKTPECPSHTQ

SEQ ID NO: 446 - protein, 48 aa, synthetic construct
  REGION 1..48: note = Synthetic Peptide
AEGSLAKATTAPATTRNTGRGGEEKKKEKEKEEQEERETKTPECPSHT

SEQ ID NO: 447 - protein, 48 aa, synthetic construct
  REGION 1..48: note = Synthetic Peptide
QAEGSLAKATTAPATTRNTGRGGEEKKKEKEKEEQEERETKTPECPSH

SEQ ID NO: 448 - protein, 48 aa, synthetic construct
  REGION 1..48: note = Synthetic Peptide
PQAEGSLAKATTAPATTRNTGRGGEEKKKEKEKEEQEERETKTPECPS

SEQ ID NO: 449 - protein, 48 aa, synthetic construct
  REGION 1..48: note = Synthetic Peptide
QPQAEGSLAKATTAPATTRNTGRGGEEKKKEKEKEEQEERETKTPECP

SEQ ID NO: 450 - protein, 48 aa, synthetic construct
  REGION 1..48: note = Synthetic Peptide
AQPQAEGSLAKATTAPATTRNTGRGGEEKKKEKEKEEQEERETKTPEC

SEQ ID NO: 451 - protein, 48 aa, synthetic construct
  REGION 1..48: note = Synthetic Peptide
TAQPQAEGSLAKATTAPATTRNTGRGGEEKKKEKEKEEQEERETKTPE

SEQ ID NO: 452 - protein, 48 aa, synthetic construct
  REGION 1..48: note = Synthetic Peptide
PTAQPQAEGSLAKATTAPATTRNTGRGGEEKKKEKEKEEQEERETKTP

SEQ ID NO: 453 - protein, 48 aa, synthetic construct
  REGION 1..48: note = Synthetic Peptide
VPTAQPQAEGSLAKATTAPATTRNTGRGGEEKKKEKEKEEQEERETKT

SEQ ID NO: 454 - protein, 48 aa, synthetic construct
  REGION 1..48: note = Synthetic Peptide
SVPTAQPQAEGSLAKATTAPATTRNTGRGGEEKKKEKEKEEQEERETK

SEQ ID NO: 455 - protein, 48 aa, synthetic construct
  REGION 1..48: note = Synthetic Peptide
SSVPTAQPQAEGSLAKATTAPATTRNTGRGGEEKKKEKEKEEQEERET

SEQ ID NO: 456 - protein, 48 aa, synthetic construct
  REGION 1..48: note = Synthetic Peptide
ASSVPTAQPQAEGSLAKATTAPATTRNTGRGGEEKKKEKEKEEQEERE

SEQ ID NO: 457 - protein, 48 aa, synthetic construct
  REGION 1..48: note = Synthetic Peptide
QASSVPTAQPQAEGSLAKATTAPATTRNTGRGGEEKKKEKEKEEQEER

SEQ ID NO: 458 - protein, 48 aa, synthetic construct
  REGION 1..48: note = Synthetic Peptide
AQASSVPTAQPQAEGSLAKATTAPATTRNTGRGGEEKKKEKEKEEQEE

SEQ ID NO: 459 - protein, 48 aa, synthetic construct
  REGION 1..48: note = Synthetic Peptide
KAQASSVPTAQPQAEGSLAKATTAPATTRNTGRGGEEKKKEKEKEEQE

SEQ ID NO: 460 - protein, 48 aa, synthetic construct
  REGION 1..48: note = Synthetic Peptide
PKAQASSVPTAQPQAEGSLAKATTAPATTRNTGRGGEEKKKEKEKEEQ

SEQ ID NO: 461 - protein, 48 aa, synthetic construct
  REGION 1..48: note = Synthetic Peptide
SPKAQASSVPTAQPQAEGSLAKATTAPATTRNTGRGGEEKKKEKEKEE

SEQ ID NO: 462 - protein, 48 aa, synthetic construct
  REGION 1..48: note = Synthetic Peptide
ESPKAQASSVPTAQPQAEGSLAKATTAPATTRNTGRGGEEKKKEKEKE

SEQ ID NO: 463 - protein, 48 aa, synthetic construct
  REGION 1..48: note = Synthetic Peptide
PESPKAQASSVPTAQPQAEGSLAKATTAPATTRNTGRGGEEKKKEKEK

SEQ ID NO: 464 - protein, 48 aa, synthetic construct
  REGION 1..48: note = Synthetic Peptide
WPESPKAQASSVPTAQPQAEGSLAKATTAPATTRNTGRGGEEKKKEKE

SEQ ID NO: 465 - protein, 48 aa, synthetic construct
  REGION 1..48: note = Synthetic Peptide
RWPESPKAQASSVPTAQPQAEGSLAKATTAPATTRNTGRGGEEKKKEK

SEQ ID NO: 466 - protein, 47 aa, synthetic construct
  REGION 1..47: note = Synthetic Peptide
PATTRNTGRGGEEKKKEKEKEEQEERETKTPECPSHTQPLGVYLLTP

SEQ ID NO: 467 - protein, 47 aa, synthetic construct
  REGION 1..47: note = Synthetic Peptide
APATTRNTGRGGEEKKKEKEKEEQEERETKTPECPSHTQPLGVYLLT

SEQ ID NO: 468 - protein, 47 aa, synthetic construct
  REGION 1..47: note = Synthetic Peptide
TAPATTRNTGRGGEEKKKEKEKEEQEERETKTPECPSHTQPLGVYLL

SEQ ID NO: 469 - protein, 47 aa, synthetic construct
  REGION 1..47: note = Synthetic Peptide
TTAPATTRNTGRGGEEKKKEKEKEEQEERETKTPECPSHTQPLGVYL

SEQ ID NO: 470 - protein, 47 aa, synthetic construct
  REGION 1..47: note = Synthetic Peptide
ATTAPATTRNTGRGGEEKKKEKEKEEQEERETKTPECPSHTQPLGVY

SEQ ID NO: 471 - protein, 47 aa, synthetic construct
  REGION 1..47: note = Synthetic Peptide
KATTAPATTRNTGRGGEEKKKEKEKEEQEERETKTPECPSHTQPLGV

SEQ ID NO: 472 - protein, 47 aa, synthetic construct
  REGION 1..47: note = Synthetic Peptide
AKATTAPATTRNTGRGGEEKKKEKEKEEQEERETKTPECPSHTQPLG

SEQ ID NO: 473 - protein, 47 aa, synthetic construct
  REGION 1..47: note = Synthetic Peptide
LAKATTAPATTRNTGRGGEEKKKEKEKEEQEERETKTPECPSHTQPL

SEQ ID NO: 474 - protein, 47 aa, synthetic construct
  REGION 1..47: note = Synthetic Peptide
SLAKATTAPATTRNTGRGGEEKKKEKEKEEQEERETKTPECPSHTQP

SEQ ID NO: 475 - protein, 47 aa, synthetic construct
  REGION 1..47: note = Synthetic Peptide
GSLAKATTAPATTRNTGRGGEEKKKEKEKEEQEERETKTPECPSHTQ

SEQ ID NO: 476 - protein, 47 aa, synthetic construct
  REGION 1..47: note = Synthetic Peptide
EGSLAKATTAPATTRNTGRGGEEKKKEKEKEEQEERETKTPECPSHT

SEQ ID NO: 477 - protein, 47 aa, synthetic construct
  REGION 1..47: note = Synthetic Peptide
AEGSLAKATTAPATTRNTGRGGEEKKKEKEKEEQEERETKTPECPSH

SEQ ID NO: 478 - protein, 47 aa, synthetic construct
  REGION 1..47: note = Synthetic Peptide
QAEGSLAKATTAPATTRNTGRGGEEKKKEKEKEEQEERETKTPECPS

SEQ ID NO: 479 - protein, 47 aa, synthetic construct
  REGION 1..47: note = Synthetic Peptide
PQAEGSLAKATTAPATTRNTGRGGEEKKKEKEKEEQEERETKTPECP

SEQ ID NO: 480 - protein, 47 aa, synthetic construct
  REGION 1..47: note = Synthetic Peptide
QPQAEGSLAKATTAPATTRNTGRGGEEKKKEKEKEEQEERETKTPEC

SEQ ID NO: 481 - protein, 47 aa, synthetic construct
  REGION 1..47: note = Synthetic Peptide
AQPQAEGSLAKATTAPATTRNTGRGGEEKKKEKEKEEQEERETKTPE

SEQ ID NO: 482 - protein, 47 aa, synthetic construct
  REGION 1..47: note = Synthetic Peptide
TAQPQAEGSLAKATTAPATTRNTGRGGEEKKKEKEKEEQEERETKTP

SEQ ID NO: 483 - protein, 47 aa, synthetic construct
  REGION 1..47: note = Synthetic Peptide
PTAQPQAEGSLAKATTAPATTRNTGRGGEEKKKEKEKEEQEERETKT

SEQ ID NO: 484 - protein, 47 aa, synthetic construct
  REGION 1..47: note = Synthetic Peptide
VPTAQPQAEGSLAKATTAPATTRNTGRGGEEKKKEKEKEEQEERETK

SEQ ID NO: 485 - protein, 47 aa, synthetic construct
  REGION 1..47: note = Synthetic Peptide
SVPTAQPQAEGSLAKATTAPATTRNTGRGGEEKKKEKEKEEQEERET

SEQ ID NO: 486 - protein, 47 aa, synthetic construct
  REGION 1..47: note = Synthetic Peptide
SSVPTAQPQAEGSLAKATTAPATTRNTGRGGEEKKKEKEKEEQEERE

SEQ ID NO: 487 - protein, 47 aa, synthetic construct
  REGION 1..47: note = Synthetic Peptide
ASSVPTAQPQAEGSLAKATTAPATTRNTGRGGEEKKKEKEKEEQEER

SEQ ID NO: 488 - protein, 47 aa, synthetic construct
  REGION 1..47: note = Synthetic Peptide
QASSVPTAQPQAEGSLAKATTAPATTRNTGRGGEEKKKEKEKEEQEE

SEQ ID NO: 489 - protein, 47 aa, synthetic construct
  REGION 1..47: note = Synthetic Peptide
AQASSVPTAQPQAEGSLAKATTAPATTRNTGRGGEEKKKEKEKEEQE

SEQ ID NO: 490 - protein, 47 aa, synthetic construct
  REGION 1..47: note = Synthetic Peptide
KAQASSVPTAQPQAEGSLAKATTAPATTRNTGRGGEEKKKEKEKEEQ

SEQ ID NO: 491 - protein, 47 aa, synthetic construct
  REGION 1..47: note = Synthetic Peptide
PKAQASSVPTAQPQAEGSLAKATTAPATTRNTGRGGEEKKKEKEKEE

SEQ ID NO: 492 - protein, 47 aa, synthetic construct
  REGION 1..47: note = Synthetic Peptide
SPKAQASSVPTAQPQAEGSLAKATTAPATTRNTGRGGEEKKKEKEKE

SEQ ID NO: 493 - protein, 47 aa, synthetic construct
  REGION 1..47: note = Synthetic Peptide
ESPKAQASSVPTAQPQAEGSLAKATTAPATTRNTGRGGEEKKKEKEK

SEQ ID NO: 494 - protein, 47 aa, synthetic construct
  REGION 1..47: note = Synthetic Peptide
PESPKAQASSVPTAQPQAEGSLAKATTAPATTRNTGRGGEEKKKEKE

SEQ ID NO: 495 - protein, 47 aa, synthetic construct
  REGION 1..47: note = Synthetic Peptide
WPESPKAQASSVPTAQPQAEGSLAKATTAPATTRNTGRGGEEKKKEK

SEQ ID NO: 496 - protein, 47 aa, synthetic construct
  REGION 1..47: note = Synthetic Peptide
RWPESPKAQASSVPTAQPQAEGSLAKATTAPATTRNTGRGGEEKKKE

SEQ ID NO: 497 - protein, 46 aa, synthetic construct
  REGION 1..46: note = Synthetic Peptide
ATTRNTGRGGEEKKKEKEKEEQEERETKTPECPSHTQPLGVYLLTP

SEQ ID NO: 498 - protein, 46 aa, synthetic construct
  REGION 1..46: note = Synthetic Peptide
PATTRNTGRGGEEKKKEKEKEEQEERETKTPECPSHTQPLGVYLLT

SEQ ID NO: 499 - protein, 46 aa, synthetic construct
  REGION 1..46: note = Synthetic Peptide
APATTRNTGRGGEEKKKEKEKEEQEERETKTPECPSHTQPLGVYLL

SEQ ID NO: 500 - protein, 46 aa, synthetic construct
  REGION 1..46: note = Synthetic Peptide
TAPATTRNTGRGGEEKKKEKEKEEQEERETKTPECPSHTQPLGVYL

SEQ ID NO: 501 - protein, 46 aa, synthetic construct
  REGION 1..46: note = Synthetic Peptide
TTAPATTRNTGRGGEEKKKEKEKEEQEERETKTPECPSHTQPLGVY

SEQ ID NO: 502 - protein, 46 aa, synthetic construct
  REGION 1..46: note = Synthetic Peptide
ATTAPATTRNTGRGGEEKKKEKEKEEQEERETKTPECPSHTQPLGV

SEQ ID NO: 503 - protein, 46 aa, synthetic construct
  REGION 1..46: note = Synthetic Peptide
KATTAPATTRNTGRGGEEKKKEKEKEEQEERETKTPECPSHTQPLG

SEQ ID NO: 504 - protein, 46 aa, synthetic construct
  REGION 1..46: note = Synthetic Peptide
AKATTAPATTRNTGRGGEEKKKEKEKEEQEERETKTPECPSHTQPL

SEQ ID NO: 505 - protein, 46 aa, synthetic construct
  REGION 1..46: note = Synthetic Peptide
LAKATTAPATTRNTGRGGEEKKKEKEKEEQEERETKTPECPSHTQP

SEQ ID NO: 506 - protein, 46 aa, synthetic construct
  REGION 1..46: note = Synthetic Peptide
SLAKATTAPATTRNTGRGGEEKKKEKEKEEQEERETKTPECPSHTQ

SEQ ID NO: 507 - protein, 46 aa, synthetic construct
  REGION 1..46: note = Synthetic Peptide
GSLAKATTAPATTRNTGRGGEEKKKEKEKEEQEERETKTPECPSHT

SEQ ID NO: 508 - protein, 46 aa, synthetic construct
  REGION 1..46: note = Synthetic Peptide
EGSLAKATTAPATTRNTGRGGEEKKKEKEKEEQEERETKTPECPSH

SEQ ID NO: 509 - protein, 46 aa, synthetic construct
  REGION 1..46: note = Synthetic Peptide
AEGSLAKATTAPATTRNTGRGGEEKKKEKEKEEQEERETKTPECPS

SEQ ID NO: 510 - protein, 46 aa, synthetic construct
  REGION 1..46: note = Synthetic Peptide
QAEGSLAKATTAPATTRNTGRGGEEKKKEKEKEEQEERETKTPECP

SEQ ID NO: 511 - protein, 46 aa, synthetic construct
  REGION 1..46: note = Synthetic Peptide
PQAEGSLAKATTAPATTRNTGRGGEEKKKEKEKEEQEERETKTPEC

SEQ ID NO: 512 - protein, 46 aa, synthetic construct
  REGION 1..46: note = Synthetic Peptide
QPQAEGSLAKATTAPATTRNTGRGGEEKKKEKEKEEQEERETKTPE

SEQ ID NO: 513 - protein, 46 aa, synthetic construct
  REGION 1..46: note = Synthetic Peptide
AQPQAEGSLAKATTAPATTRNTGRGGEEKKKEKEKEEQEERETKTP

SEQ ID NO: 514 - protein, 46 aa, synthetic construct
  REGION 1..46: note = Synthetic Peptide
TAQPQAEGSLAKATTAPATTRNTGRGGEEKKKEKEKEEQEERETKT

SEQ ID NO: 515 - protein, 46 aa, synthetic construct
  REGION 1..46: note = Synthetic Peptide
PTAQPQAEGSLAKATTAPATTRNTGRGGEEKKKEKEKEEQEERETK

SEQ ID NO: 516 - protein, 46 aa, synthetic construct
  REGION 1..46: note = Synthetic Peptide
VPTAQPQAEGSLAKATTAPATTRNTGRGGEEKKKEKEKEEQEERET

SEQ ID NO: 517 - protein, 46 aa, synthetic construct
  REGION 1..46: note = Synthetic Peptide
SVPTAQPQAEGSLAKATTAPATTRNTGRGGEEKKKEKEKEEQEERE

SEQ ID NO: 518 - protein, 46 aa, synthetic construct
  REGION 1..46: note = Synthetic Peptide
SSVPTAQPQAEGSLAKATTAPATTRNTGRGGEEKKKEKEKEEQEER

SEQ ID NO: 519 - protein, 46 aa, synthetic construct
  REGION 1..46: note = Synthetic Peptide
ASSVPTAQPQAEGSLAKATTAPATTRNTGRGGEEKKKEKEKEEQEE

SEQ ID NO: 520 - protein, 46 aa, synthetic construct
  REGION 1..46: note = Synthetic Peptide
QASSVPTAQPQAEGSLAKATTAPATTRNTGRGGEEKKKEKEKEEQE

SEQ ID NO: 521 - protein, 46 aa, synthetic construct
  REGION 1..46: note = Synthetic Peptide
AQASSVPTAQPQAEGSLAKATTAPATTRNTGRGGEEKKKEKEKEEQ

SEQ ID NO: 522 - protein, 46 aa, synthetic construct
  REGION 1..46: note = Synthetic Peptide
KAQASSVPTAQPQAEGSLAKATTAPATTRNTGRGGEEKKKEKEKEE

SEQ ID NO: 523 - protein, 46 aa, synthetic construct
  REGION 1..46: note = Synthetic Peptide
PKAQASSVPTAQPQAEGSLAKATTAPATTRNTGRGGEEKKKEKEKE

SEQ ID NO: 524 - protein, 46 aa, synthetic construct
  REGION 1..46: note = Synthetic Peptide
SPKAQASSVPTAQPQAEGSLAKATTAPATTRNTGRGGEEKKKEKEK

SEQ ID NO: 525 - protein, 46 aa, synthetic construct
  REGION 1..46: note = Synthetic Peptide
ESPKAQASSVPTAQPQAEGSLAKATTAPATTRNTGRGGEEKKKEKE

SEQ ID NO: 526 - protein, 46 aa, synthetic construct
  REGION 1..46: note = Synthetic Peptide
PESPKAQASSVPTAQPQAEGSLAKATTAPATTRNTGRGGEEKKKEK

SEQ ID NO: 527 - protein, 46 aa, synthetic construct
  REGION 1..46: note = Synthetic Peptide
RWPESPKAQASSVPTAQPQAEGSLAKATTAPATTRNTGRGGEEKKK

SEQ ID NO: 528 - protein, 46 aa, synthetic construct
  REGION 1..46: note = Synthetic Peptide
WPESPKAQASSVPTAQPQAEGSLAKATTAPATTRNTGRGGEEKKKE

SEQ ID NO: 529 - protein, 45 aa, synthetic construct
  REGION 1..45: note = Synthetic Peptide
TTRNTGRGGEEKKKEKEKEEQEERETKTPECPSHTQPLGVYLLTP

SEQ ID NO: 530 - protein, 45 aa, synthetic construct
  REGION 1..45: note = Synthetic Peptide
ATTRNTGRGGEEKKKEKEKEEQEERETKTPECPSHTQPLGVYLLT

SEQ ID NO: 531 - protein, 45 aa, synthetic construct
  REGION 1..45: note = Synthetic Peptide
PATTRNTGRGGEEKKKEKEKEEQEERETKTPECPSHTQPLGVYLL

SEQ ID NO: 532 - protein, 45 aa, synthetic construct
  REGION 1..45: note = Synthetic Peptide
APATTRNTGRGGEEKKKEKEKEEQEERETKTPECPSHTQPLGVYL

SEQ ID NO: 533 - protein, 45 aa, synthetic construct
  REGION 1..45: note = Synthetic Peptide
TAPATTRNTGRGGEEKKKEKEKEEQEERETKTPECPSHTQPLGVY

SEQ ID NO: 534 - protein, 45 aa, synthetic construct
  REGION 1..45: note = Synthetic Peptide
TTAPATTRNTGRGGEEKKKEKEKEEQEERETKTPECPSHTQPLGV

SEQ ID NO: 535 - protein, 45 aa, synthetic construct
  REGION 1..45: note = Synthetic Peptide
ATTAPATTRNTGRGGEEKKKEKEKEEQEERETKTPECPSHTQPLG

SEQ ID NO: 536 - protein, 45 aa, synthetic construct
  REGION 1..45: note = Synthetic Peptide
KATTAPATTRNTGRGGEEKKKEKEKEEQEERETKTPECPSHTQPL

SEQ ID NO: 537 - protein, 45 aa, synthetic construct
  REGION 1..45: note = Synthetic Peptide
AKATTAPATTRNTGRGGEEKKKEKEKEEQEERETKTPECPSHTQP

SEQ ID NO: 538 - protein, 45 aa, synthetic construct
  REGION 1..45: note = Synthetic Peptide
LAKATTAPATTRNTGRGGEEKKKEKEKEEQEERETKTPECPSHTQ

SEQ ID NO: 539 - protein, 45 aa, synthetic construct
  REGION 1..45: note = Synthetic Peptide
SLAKATTAPATTRNTGRGGEEKKKEKEKEEQEERETKTPECPSHT

SEQ ID NO: 540 - protein, 45 aa, synthetic construct
  REGION 1..45: note = Synthetic Peptide
GSLAKATTAPATTRNTGRGGEEKKKEKEKEEQEERETKTPECPSH

SEQ ID NO: 541 - protein, 45 aa, synthetic construct
  REGION 1..45: note = Synthetic Peptide
EGSLAKATTAPATTRNTGRGGEEKKKEKEKEEQEERETKTPECPS

SEQ ID NO: 542 - protein, 45 aa, synthetic construct
  REGION 1..45: note = Synthetic Peptide
AEGSLAKATTAPATTRNTGRGGEEKKKEKEKEEQEERETKTPECP

SEQ ID NO: 543 - protein, 45 aa, synthetic construct
  REGION 1..45: note = Synthetic Peptide
QAEGSLAKATTAPATTRNTGRGGEEKKKEKEKEEQEERETKTPEC

SEQ ID NO: 544 - protein, 45 aa, synthetic construct
  REGION 1..45: note = Synthetic Peptide
PQAEGSLAKATTAPATTRNTGRGGEEKKKEKEKEEQEERETKTPE

SEQ ID NO: 545 - protein, 45 aa, synthetic construct
  REGION 1..45: note = Synthetic Peptide
QPQAEGSLAKATTAPATTRNTGRGGEEKKKEKEKEEQEERETKTP

SEQ ID NO: 546 - protein, 45 aa, synthetic construct
  REGION 1..45: note = Synthetic Peptide
AQPQAEGSLAKATTAPATTRNTGRGGEEKKKEKEKEEQEERETKT

SEQ ID NO: 547 - protein, 45 aa, synthetic construct
  REGION 1..45: note = Synthetic Peptide
TAQPQAEGSLAKATTAPATTRNTGRGGEEKKKEKEKEEQEERETK

SEQ ID NO: 548 - protein, 45 aa, synthetic construct
  REGION 1..45: note = Synthetic Peptide
PTAQPQAEGSLAKATTAPATTRNTGRGGEEKKKEKEKEEQEERET

SEQ ID NO: 549 - protein, 45 aa, synthetic construct
  REGION 1..45: note = Synthetic Peptide
VPTAQPQAEGSLAKATTAPATTRNTGRGGEEKKKEKEKEEQEERE

SEQ ID NO: 550 - protein, 45 aa, synthetic construct
  REGION 1..45: note = Synthetic Peptide
SVPTAQPQAEGSLAKATTAPATTRNTGRGGEEKKKEKEKEEQEER

SEQ ID NO: 551 - protein, 45 aa, synthetic construct
  REGION 1..45: note = Synthetic Peptide
SSVPTAQPQAEGSLAKATTAPATTRNTGRGGEEKKKEKEKEEQEE

SEQ ID NO: 552 - protein, 45 aa, synthetic construct
  REGION 1..45: note = Synthetic Peptide
ASSVPTAQPQAEGSLAKATTAPATTRNTGRGGEEKKKEKEKEEQE

SEQ ID NO: 553 - protein, 45 aa, synthetic construct
  REGION 1..45: note = Synthetic Peptide
QASSVPTAQPQAEGSLAKATTAPATTRNTGRGGEEKKKEKEKEEQ

SEQ ID NO: 554 - protein, 45 aa, synthetic construct
  REGION 1..45: note = Synthetic Peptide
AQASSVPTAQPQAEGSLAKATTAPATTRNTGRGGEEKKKEKEKEE

SEQ ID NO: 555 - protein, 45 aa, synthetic construct
  REGION 1..45: note = Synthetic Peptide
KAQASSVPTAQPQAEGSLAKATTAPATTRNTGRGGEEKKKEKEKE

SEQ ID NO: 556 - protein, 45 aa, synthetic construct
  REGION 1..45: note = Synthetic Peptide
PKAQASSVPTAQPQAEGSLAKATTAPATTRNTGRGGEEKKKEKEK

SEQ ID NO: 557 - protein, 45 aa, synthetic construct
  REGION 1..45: note = Synthetic Peptide
SPKAQASSVPTAQPQAEGSLAKATTAPATTRNTGRGGEEKKKEKE

SEQ ID NO: 558 - protein, 45 aa, synthetic construct
  REGION 1..45: note = Synthetic Peptide
ESPKAQASSVPTAQPQAEGSLAKATTAPATTRNTGRGGEEKKKEK

SEQ ID NO: 559 - protein, 45 aa, synthetic construct
  REGION 1..45: note = Synthetic Peptide
PESPKAQASSVPTAQPQAEGSLAKATTAPATTRNTGRGGEEKKKE

SEQ ID NO: 560 - protein, 45 aa, synthetic construct
  REGION 1..45: note = Synthetic Peptide
WPESPKAQASSVPTAQPQAEGSLAKATTAPATTRNTGRGGEEKKK

SEQ ID NO: 561 - protein, 45 aa, synthetic construct
  REGION 1..45: note = Synthetic Peptide
RWPESPKAQASSVPTAQPQAEGSLAKATTAPATTRNTGRGGEEKK

SEQ ID NO: 562 - protein, 44 aa, synthetic construct
  REGION 1..44: note = Synthetic Peptide
TRNTGRGGEEKKKEKEKEEQEERETKTPECPSHTQPLGVYLLTP

SEQ ID NO: 563 - protein, 44 aa, synthetic construct
  REGION 1..44: note = Synthetic Peptide
TTRNTGRGGEEKKKEKEKEEQEERETKTPECPSHTQPLGVYLLT

SEQ ID NO: 564 - protein, 44 aa, synthetic construct
  REGION 1..44: note = Synthetic Peptide
ATTRNTGRGGEEKKKEKEKEEQEERETKTPECPSHTQPLGVYLL

SEQ ID NO: 565 - protein, 44 aa, synthetic construct
  REGION 1..44: note = Synthetic Peptide
PATTRNTGRGGEEKKKEKEKEEQEERETKTPECPSHTQPLGVYL

SEQ ID NO: 566 - protein, 44 aa, synthetic construct
  REGION 1..44: note = Synthetic Peptide
APATTRNTGRGGEEKKKEKEKEEQEERETKTPECPSHTQPLGVY

SEQ ID NO: 567 - protein, 44 aa, synthetic construct
  REGION 1..44: note = Synthetic Peptide
TAPATTRNTGRGGEEKKKEKEKEEQEERETKTPECPSHTQPLGV

SEQ ID NO: 568 - protein, 44 aa, synthetic construct
  REGION 1..44: note = Synthetic Peptide
TTAPATTRNTGRGGEEKKKEKEKEEQEERETKTPECPSHTQPLG

SEQ ID NO: 569 - protein, 44 aa, synthetic construct
  REGION 1..44: note = Synthetic Peptide
ATTAPATTRNTGRGGEEKKKEKEKEEQEERETKTPECPSHTQPL

SEQ ID NO: 570 - protein, 44 aa, synthetic construct
  REGION 1..44: note = Synthetic Peptide
KATTAPATTRNTGRGGEEKKKEKEKEEQEERETKTPECPSHTQP

SEQ ID NO: 571 - protein, 44 aa, synthetic construct
  REGION 1..44: note = Synthetic Peptide
AKATTAPATTRNTGRGGEEKKKEKEKEEQEERETKTPECPSHTQ

SEQ ID NO: 572 - protein, 44 aa, synthetic construct
  REGION 1..44: note = Synthetic Peptide
LAKATTAPATTRNTGRGGEEKKKEKEKEEQEERETKTPECPSHT

SEQ ID NO: 573 - protein, 44 aa, synthetic construct
  REGION 1..44: note = Synthetic Peptide
SLAKATTAPATTRNTGRGGEEKKKEKEKEEQEERETKTPECPSH

SEQ ID NO: 574 - protein, 44 aa, synthetic construct
  REGION 1..44: note = Synthetic Peptide
GSLAKATTAPATTRNTGRGGEEKKKEKEKEEQEERETKTPECPS

SEQ ID NO: 575 - protein, 44 aa, synthetic construct
  REGION 1..44: note = Synthetic Peptide
EGSLAKATTAPATTRNTGRGGEEKKKEKEKEEQEERETKTPECP

SEQ ID NO: 576 - protein, 44 aa, synthetic construct
  REGION 1..44: note = Synthetic Peptide
AEGSLAKATTAPATTRNTGRGGEEKKKEKEKEEQEERETKTPEC

SEQ ID NO: 577 - protein, 44 aa, synthetic construct
  REGION 1..44: note = Synthetic Peptide
QAEGSLAKATTAPATTRNTGRGGEEKKKEKEKEEQEERETKTPE

SEQ ID NO: 578 - protein, 44 aa, synthetic construct
  REGION 1..44: note = Synthetic Peptide
PQAEGSLAKATTAPATTRNTGRGGEEKKKEKEKEEQEERETKTP

SEQ ID NO: 579 - protein, 44 aa, synthetic construct
  REGION 1..44: note = Synthetic Peptide
QPQAEGSLAKATTAPATTRNTGRGGEEKKKEKEKEEQEERETKT

SEQ ID NO: 580 - protein, 44 aa, synthetic construct
  REGION 1..44: note = Synthetic Peptide
AQPQAEGSLAKATTAPATTRNTGRGGEEKKKEKEKEEQEERETK

SEQ ID NO: 581 - protein, 44 aa, synthetic construct
  REGION 1..44: note = Synthetic Peptide
TAQPQAEGSLAKATTAPATTRNTGRGGEEKKKEKEKEEQEERET

SEQ ID NO: 582 - protein, 44 aa, synthetic construct
  REGION 1..44: note = Synthetic Peptide
PTAQPQAEGSLAKATTAPATTRNTGRGGEEKKKEKEKEEQEERE

SEQ ID NO: 583 - protein, 44 aa, synthetic construct
  REGION 1..44: note = Synthetic Peptide
VPTAQPQAEGSLAKATTAPATTRNTGRGGEEKKKEKEKEEQEER

SEQ ID NO: 584 - protein, 44 aa, synthetic construct
  REGION 1..44: note = Synthetic Peptide
SVPTAQPQAEGSLAKATTAPATTRNTGRGGEEKKKEKEKEEQEE

SEQ ID NO: 585 - protein, 44 aa, synthetic construct
  REGION 1..44: note = Synthetic Peptide
SSVPTAQPQAEGSLAKATTAPATTRNTGRGGEEKKKEKEKEEQE

SEQ ID NO: 586 - protein, 44 aa, synthetic construct
  REGION 1..44: note = Synthetic Peptide
ASSVPTAQPQAEGSLAKATTAPATTRNTGRGGEEKKKEKEKEEQ

SEQ ID NO: 587 - protein, 44 aa, synthetic construct
  REGION 1..44: note = Synthetic Peptide
QASSVPTAQPQAEGSLAKATTAPATTRNTGRGGEEKKKEKEKEE

SEQ ID NO: 588 - protein, 44 aa, synthetic construct
  REGION 1..44: note = Synthetic Peptide
AQASSVPTAQPQAEGSLAKATTAPATTRNTGRGGEEKKKEKEKE

SEQ ID NO: 589 - protein, 44 aa, synthetic construct
  REGION 1..44: note = Synthetic Peptide
KAQASSVPTAQPQAEGSLAKATTAPATTRNTGRGGEEKKKEKEK

SEQ ID NO: 590 - protein, 44 aa, synthetic construct
  REGION 1..44: note = Synthetic Peptide
PKAQASSVPTAQPQAEGSLAKATTAPATTRNTGRGGEEKKKEKE

SEQ ID NO: 591 - protein, 44 aa, synthetic construct
  REGION 1..44: note = Synthetic Peptide
SPKAQASSVPTAQPQAEGSLAKATTAPATTRNTGRGGEEKKKEK

SEQ ID NO: 592 - protein, 44 aa, synthetic construct
  REGION 1..44: note = Synthetic Peptide
ESPKAQASSVPTAQPQAEGSLAKATTAPATTRNTGRGGEEKKKE

SEQ ID NO: 593 - protein, 44 aa, synthetic construct
  REGION 1..44: note = Synthetic Peptide
PESPKAQASSVPTAQPQAEGSLAKATTAPATTRNTGRGGEEKKK

SEQ ID NO: 594 - protein, 44 aa, synthetic construct
  REGION 1..44: note = Synthetic Peptide
RWPESPKAQASSVPTAQPQAEGSLAKATTAPATTRNTGRGGEEK

SEQ ID NO: 595 - protein, 44 aa, synthetic construct
  REGION 1..44: note = Synthetic Peptide
WPESPKAQASSVPTAQPQAEGSLAKATTAPATTRNTGRGGEEKK

SEQ ID NO: 596 - protein, 43 aa, synthetic construct
  REGION 1..43: note = Synthetic Peptide
RNTGRGGEEKKKEKEKEEQEERETKTPECPSHTQPLGVYLLTP

SEQ ID NO: 597 - protein, 43 aa, synthetic construct
  REGION 1..43: note = Synthetic Peptide
TRNTGRGGEEKKKEKEKEEQEERETKTPECPSHTQPLGVYLLT

SEQ ID NO: 598 - protein, 43 aa, synthetic construct
  REGION 1..43: note = Synthetic Peptide
TTRNTGRGGEEKKKEKEKEEQEERETKTPECPSHTQPLGVYLL

SEQ ID NO: 599 - protein, 43 aa, synthetic construct
  REGION 1..43: note = Synthetic Peptide
ATTRNTGRGGEEKKKEKEKEEQEERETKTPECPSHTQPLGVYL

SEQ ID NO: 600 - protein, 43 aa, synthetic construct
  REGION 1..43: note = Synthetic Peptide
PATTRNTGRGGEEKKKEKEKEEQEERETKTPECPSHTQPLGVY

SEQ ID NO: 601 - protein, 43 aa, synthetic construct
  REGION 1..43: note = Synthetic Peptide
APATTRNTGRGGEEKKKEKEKEEQEERETKTPECPSHTQPLGV

SEQ ID NO: 602 - protein, 43 aa, synthetic construct
  REGION 1..43: note = Synthetic Peptide
TAPATTRNTGRGGEEKKKEKEKEEQEERETKTPECPSHTQPLG

SEQ ID NO: 603 - protein, 43 aa, synthetic construct
  REGION 1..43: note = Synthetic Peptide
TTAPATTRNTGRGGEEKKKEKEKEEQEERETKTPECPSHTQPL

SEQ ID NO: 604 - protein, 43 aa, synthetic construct
  REGION 1..43: note = Synthetic Peptide
ATTAPATTRNTGRGGEEKKKEKEKEEQEERETKTPECPSHTQP

SEQ ID NO: 605 - protein, 43 aa, synthetic construct
  REGION 1..43: note = Synthetic Peptide
KATTAPATTRNTGRGGEEKKKEKEKEEQEERETKTPECPSHTQ

SEQ ID NO: 606 - protein, 43 aa, synthetic construct
  REGION 1..43: note = Synthetic Peptide
AKATTAPATTRNTGRGGEEKKKEKEKEEQEERETKTPECPSHT

SEQ ID NO: 607 - protein, 43 aa, synthetic construct
  REGION 1..43: note = Synthetic Peptide
LAKATTAPATTRNTGRGGEEKKKEKEKEEQEERETKTPECPSH

SEQ ID NO: 608 - protein, 43 aa, synthetic construct
  REGION 1..43: note = Synthetic Peptide
SLAKATTAPATTRNTGRGGEEKKKEKEKEEQEERETKTPECPS

SEQ ID NO: 609 - protein, 43 aa, synthetic construct
  REGION 1..43: note = Synthetic Peptide
GSLAKATTAPATTRNTGRGGEEKKKEKEKEEQEERETKTPECP

SEQ ID NO: 610 - protein, 43 aa, synthetic construct
  REGION 1..43: note = Synthetic Peptide
EGSLAKATTAPATTRNTGRGGEEKKKEKEKEEQEERETKTPEC

SEQ ID NO: 611 - protein, 43 aa, synthetic construct
  REGION 1..43: note = Synthetic Peptide
AEGSLAKATTAPATTRNTGRGGEEKKKEKEKEEQEERETKTPE

SEQ ID NO: 612 - protein, 43 aa, synthetic construct
  REGION 1..43: note = Synthetic Peptide
QAEGSLAKATTAPATTRNTGRGGEEKKKEKEKEEQEERETKTP

SEQ ID NO: 613 - protein, 43 aa, synthetic construct
  REGION 1..43: note = Synthetic Peptide
PQAEGSLAKATTAPATTRNTGRGGEEKKKEKEKEEQEERETKT

SEQ ID NO: 614 - protein, 43 aa, synthetic construct
  REGION 1..43: note = Synthetic Peptide
QPQAEGSLAKATTAPATTRNTGRGGEEKKKEKEKEEQEERETK

SEQ ID NO: 615 - protein, 43 aa, synthetic construct
  REGION 1..43: note = Synthetic Peptide
AQPQAEGSLAKATTAPATTRNTGRGGEEKKKEKEKEEQEERET

SEQ ID NO: 616 - protein, 43 aa, synthetic construct
  REGION 1..43: note = Synthetic Peptide
TAQPQAEGSLAKATTAPATTRNTGRGGEEKKKEKEKEEQEERE

SEQ ID NO: 617 - protein, 43 aa, synthetic construct
  REGION 1..43: note = Synthetic Peptide
PTAQPQAEGSLAKATTAPATTRNTGRGGEEKKKEKEKEEQEER

SEQ ID NO: 618 - protein, 43 aa, synthetic construct
  REGION 1..43: note = Synthetic Peptide
VPTAQPQAEGSLAKATTAPATTRNTGRGGEEKKKEKEKEEQEE

SEQ ID NO: 619 - protein, 43 aa, synthetic construct
  REGION 1..43: note = Synthetic Peptide
SVPTAQPQAEGSLAKATTAPATTRNTGRGGEEKKKEKEKEEQE

SEQ ID NO: 620 - protein, 43 aa, synthetic construct
  REGION 1..43: note = Synthetic Peptide
SSVPTAQPQAEGSLAKATTAPATTRNTGRGGEEKKKEKEKEEQ

SEQ ID NO: 621 - protein, 43 aa, synthetic construct
  REGION 1..43: note = Synthetic Peptide
ASSVPTAQPQAEGSLAKATTAPATTRNTGRGGEEKKKEKEKEE

SEQ ID NO: 622 - protein, 43 aa, synthetic construct
  REGION 1..43: note = Synthetic Peptide
QASSVPTAQPQAEGSLAKATTAPATTRNTGRGGEEKKKEKEKE

SEQ ID NO: 623 - protein, 43 aa, synthetic construct
  REGION 1..43: note = Synthetic Peptide
AQASSVPTAQPQAEGSLAKATTAPATTRNTGRGGEEKKKEKEK

SEQ ID NO: 624 - protein, 43 aa, synthetic construct
  REGION 1..43: note = Synthetic Peptide
KAQASSVPTAQPQAEGSLAKATTAPATTRNTGRGGEEKKKEKE

SEQ ID NO: 625 - protein, 43 aa, synthetic construct
  REGION 1..43: note = Synthetic Peptide
PKAQASSVPTAQPQAEGSLAKATTAPATTRNTGRGGEEKKKEK

SEQ ID NO: 626 - protein, 43 aa, synthetic construct
  REGION 1..43: note = Synthetic Peptide
SPKAQASSVPTAQPQAEGSLAKATTAPATTRNTGRGGEEKKKE

SEQ ID NO: 627 - protein, 43 aa, synthetic construct
  REGION 1..43: note = Synthetic Peptide
ESPKAQASSVPTAQPQAEGSLAKATTAPATTRNTGRGGEEKKK

SEQ ID NO: 628 - protein, 43 aa, synthetic construct
  REGION 1..43: note = Synthetic Peptide
PESPKAQASSVPTAQPQAEGSLAKATTAPATTRNTGRGGEEKK

SEQ ID NO: 629 - protein, 43 aa, synthetic construct
  REGION 1..43: note = Synthetic Peptide
WPESPKAQASSVPTAQPQAEGSLAKATTAPATTRNTGRGGEEK

SEQ ID NO: 630 - protein, 43 aa, synthetic construct
  REGION 1..43: note = Synthetic Peptide
RWPESPKAQASSVPTAQPQAEGSLAKATTAPATTRNTGRGGEE

SEQ ID NO: 631 - protein, 42 aa, synthetic construct
  REGION 1..42: note = Synthetic Peptide
NTGRGGEEKKKEKEKEEQEERETKTPECPSHTQPLGVYLLTP

SEQ ID NO: 632 - protein, 42 aa, synthetic construct
  REGION 1..42: note = Synthetic Peptide
RNTGRGGEEKKKEKEKEEQEERETKTPECPSHTQPLGVYLLT

SEQ ID NO: 633 - protein, 42 aa, synthetic construct
  REGION 1..42: note = Synthetic Peptide
TRNTGRGGEEKKKEKEKEEQEERETKTPECPSHTQPLGVYLL

SEQ ID NO: 634 - protein, 42 aa, synthetic construct
  REGION 1..42: note = Synthetic Peptide
TTRNTGRGGEEKKKEKEKEEQEERETKTPECPSHTQPLGVYL

SEQ ID NO: 635 - protein, 42 aa, synthetic construct
  REGION 1..42: note = Synthetic Peptide
ATTRNTGRGGEEKKKEKEKEEQEERETKTPECPSHTQPLGVY

SEQ ID NO: 636 - protein, 42 aa, synthetic construct
  REGION 1..42: note = Synthetic Peptide
PATTRNTGRGGEEKKKEKEKEEQEERETKTPECPSHTQPLGV

SEQ ID NO: 637 - protein, 42 aa, synthetic construct
  REGION 1..42: note = Synthetic Peptide
APATTRNTGRGGEEKKKEKEKEEQEERETKTPECPSHTQPLG

SEQ ID NO: 638 - protein, 42 aa, synthetic construct
  REGION 1..42: note = Synthetic Peptide
TAPATTRNTGRGGEEKKKEKEKEEQEERETKTPECPSHTQPL

SEQ ID NO: 639 - protein, 42 aa, synthetic construct
  REGION 1..42: note = Synthetic Peptide
TTAPATTRNTGRGGEEKKKEKEKEEQEERETKTPECPSHTQP

SEQ ID NO: 640 - protein, 42 aa, synthetic construct
  REGION 1..42: note = Synthetic Peptide
ATTAPATTRNTGRGGEEKKKEKEKEEQEERETKTPECPSHTQ

SEQ ID NO: 641 - protein, 42 aa, synthetic construct
  REGION 1..42: note = Synthetic Peptide
KATTAPATTRNTGRGGEEKKKEKEKEEQEERETKTPECPSHT

SEQ ID NO: 642 - protein, 42 aa, synthetic construct
  REGION 1..42: note = Synthetic Peptide
AKATTAPATTRNTGRGGEEKKKEKEKEEQEERETKTPECPSH

SEQ ID NO: 643 - protein, 42 aa, synthetic construct
  REGION 1..42: note = Synthetic Peptide
LAKATTAPATTRNTGRGGEEKKKEKEKEEQEERETKTPECPS

SEQ ID NO: 644 - protein, 42 aa, synthetic construct
  REGION 1..42: note = Synthetic Peptide
SLAKATTAPATTRNTGRGGEEKKKEKEKEEQEERETKTPECP

SEQ ID NO: 645 - protein, 42 aa, synthetic construct
  REGION 1..42: note = Synthetic Peptide
GSLAKATTAPATTRNTGRGGEEKKKEKEKEEQEERETKTPEC

SEQ ID NO: 646 - protein, 42 aa, synthetic construct
  REGION 1..42: note = Synthetic Peptide
EGSLAKATTAPATTRNTGRGGEEKKKEKEKEEQEERETKTPE

SEQ ID NO: 647 - protein, 42 aa, synthetic construct
  REGION 1..42: note = Synthetic Peptide
AEGSLAKATTAPATTRNTGRGGEEKKKEKEKEEQEERETKTP

SEQ ID NO: 648 - protein, 42 aa, synthetic construct
  REGION 1..42: note = Synthetic Peptide
QAEGSLAKATTAPATTRNTGRGGEEKKKEKEKEEQEERETKT

SEQ ID NO: 649 - protein, 42 aa, synthetic construct
  REGION 1..42: note = Synthetic Peptide
PQAEGSLAKATTAPATTRNTGRGGEEKKKEKEKEEQEERETK

SEQ ID NO: 650 - protein, 42 aa, synthetic construct
  REGION 1..42: note = Synthetic Peptide
QPQAEGSLAKATTAPATTRNTGRGGEEKKKEKEKEEQEERET

SEQ ID NO: 651 - protein, 42 aa, synthetic construct
  REGION 1..42: note = Synthetic Peptide
AQPQAEGSLAKATTAPATTRNTGRGGEEKKKEKEKEEQEERE

SEQ ID NO: 652 - protein, 42 aa, synthetic construct
  REGION 1..42: note = Synthetic Peptide
TAQPQAEGSLAKATTAPATTRNTGRGGEEKKKEKEKEEQEER

SEQ ID NO: 653 - protein, 42 aa, synthetic construct
  REGION 1..42: note = Synthetic Peptide
PTAQPQAEGSLAKATTAPATTRNTGRGGEEKKKEKEKEEQEE

SEQ ID NO: 654 - protein, 42 aa, synthetic construct
  REGION 1..42: note = Synthetic Peptide
VPTAQPQAEGSLAKATTAPATTRNTGRGGEEKKKEKEKEEQE

SEQ ID NO: 655 - protein, 42 aa, synthetic construct
  REGION 1..42: note = Synthetic Peptide
SVPTAQPQAEGSLAKATTAPATTRNTGRGGEEKKKEKEKEEQ

SEQ ID NO: 656 - protein, 42 aa, synthetic construct
  REGION 1..42: note = Synthetic Peptide
SSVPTAQPQAEGSLAKATTAPATTRNTGRGGEEKKKEKEKEE

SEQ ID NO: 657 - protein, 42 aa, synthetic construct
  REGION 1..42: note = Synthetic Peptide
ASSVPTAQPQAEGSLAKATTAPATTRNTGRGGEEKKKEKEKE

SEQ ID NO: 658 - protein, 42 aa, synthetic construct
  REGION 1..42: note = Synthetic Peptide
QASSVPTAQPQAEGSLAKATTAPATTRNTGRGGEEKKKEKEK

SEQ ID NO: 659 - protein, 42 aa, synthetic construct
  REGION 1..42: note = Synthetic Peptide
AQASSVPTAQPQAEGSLAKATTAPATTRNTGRGGEEKKKEKE

SEQ ID NO: 660 - protein, 42 aa, synthetic construct
  REGION 1..42: note = Synthetic Peptide
KAQASSVPTAQPQAEGSLAKATTAPATTRNTGRGGEEKKKEK

SEQ ID NO: 661 - protein, 42 aa, synthetic construct
  REGION 1..42: note = Synthetic Peptide
PKAQASSVPTAQPQAEGSLAKATTAPATTRNTGRGGEEKKKE

SEQ ID NO: 662 - protein, 42 aa, synthetic construct
  REGION 1..42: note = Synthetic Peptide
SPKAQASSVPTAQPQAEGSLAKATTAPATTRNTGRGGEEKKK

SEQ ID NO: 663 - protein, 42 aa, synthetic construct
  REGION 1..42: note = Synthetic Peptide
ESPKAQASSVPTAQPQAEGSLAKATTAPATTRNTGRGGEEKK

SEQ ID NO: 664 - protein, 42 aa, synthetic construct
  REGION 1..42: note = Synthetic Peptide
PESPKAQASSVPTAQPQAEGSLAKATTAPATTRNTGRGGEEK

SEQ ID NO: 665 - protein, 42 aa, synthetic construct
  REGION 1..42: note = Synthetic Peptide
WPESPKAQASSVPTAQPQAEGSLAKATTAPATTRNTGRGGEE

SEQ ID NO: 666 - protein, 42 aa, synthetic construct
  REGION 1..42: note = Synthetic Peptide
RWPESPKAQASSVPTAQPQAEGSLAKATTAPATTRNTGRGGE

SEQ ID NO: 667 - protein, 41 aa, synthetic construct
  REGION 1..41: note = Synthetic Peptide
TGRGGEEKKKEKEKEEQEERETKTPECPSHTQPLGVYLLTP

SEQ ID NO: 668 - protein, 41 aa, synthetic construct
  REGION 1..41: note = Synthetic Peptide
NTGRGGEEKKKEKEKEEQEERETKTPECPSHTQPLGVYLLT

SEQ ID NO: 669 - protein, 41 aa, synthetic construct
  REGION 1..41: note = Synthetic Peptide
RNTGRGGEEKKKEKEKEEQEERETKTPECPSHTQPLGVYLL

SEQ ID NO: 670 - protein, 41 aa, synthetic construct
  REGION 1..41: note = Synthetic Peptide
TRNTGRGGEEKKKEKEKEEQEERETKTPECPSHTQPLGVYL

SEQ ID NO: 671 - protein, 41 aa, synthetic construct
  REGION 1..41: note = Synthetic Peptide
TTRNTGRGGEEKKKEKEKEEQEERETKTPECPSHTQPLGVY

SEQ ID NO: 672 - protein, 41 aa, synthetic construct
  REGION 1..41: note = Synthetic Peptide
ATTRNTGRGGEEKKKEKEKEEQEERETKTPECPSHTQPLGV

SEQ ID NO: 673 - protein, 41 aa, synthetic construct
  REGION 1..41: note = Synthetic Peptide
PATTRNTGRGGEEKKKEKEKEEQEERETKTPECPSHTQPLG

SEQ ID NO: 674 - protein, 41 aa, synthetic construct
  REGION 1..41: note = Synthetic Peptide
APATTRNTGRGGEEKKKEKEKEEQEERETKTPECPSHTQPL

SEQ ID NO: 675 - protein, 41 aa, synthetic construct
  REGION 1..41: note = Synthetic Peptide
TAPATTRNTGRGGEEKKKEKEKEEQEERETKTPECPSHTQP

SEQ ID NO: 676 - protein, 41 aa, synthetic construct
  REGION 1..41: note = Synthetic Peptide
TTAPATTRNTGRGGEEKKKEKEKEEQEERETKTPECPSHTQ

SEQ ID NO: 677 - protein, 41 aa, synthetic construct
  REGION 1..41: note = Synthetic Peptide
ATTAPATTRNTGRGGEEKKKEKEKEEQEERETKTPECPSHT

SEQ ID NO: 678 - protein, 41 aa, synthetic construct
  REGION 1..41: note = Synthetic Peptide
KATTAPATTRNTGRGGEEKKKEKEKEEQEERETKTPECPSH

SEQ ID NO: 679 - protein, 41 aa, synthetic construct
  REGION 1..41: note = Synthetic Peptide
AKATTAPATTRNTGRGGEEKKKEKEKEEQEERETKTPECPS

SEQ ID NO: 680 - protein, 41 aa, synthetic construct
  REGION 1..41: note = Synthetic Peptide
LAKATTAPATTRNTGRGGEEKKKEKEKEEQEERETKTPECP

SEQ ID NO: 681 - protein, 41 aa, synthetic construct
  REGION 1..41: note = Synthetic Peptide
SLAKATTAPATTRNTGRGGEEKKKEKEKEEQEERETKTPEC

SEQ ID NO: 682 - protein, 41 aa, synthetic construct
  REGION 1..41: note = Synthetic Peptide
GSLAKATTAPATTRNTGRGGEEKKKEKEKEEQEERETKTPE

SEQ ID NO: 683 - protein, 41 aa, synthetic construct
  REGION 1..41: note = Synthetic Peptide
EGSLAKATTAPATTRNTGRGGEEKKKEKEKEEQEERETKTP

SEQ ID NO: 684 - protein, 41 aa, synthetic construct
  REGION 1..41: note = Synthetic Peptide
AEGSLAKATTAPATTRNTGRGGEEKKKEKEKEEQEERETKT

SEQ ID NO: 685 - protein, 41 aa, synthetic construct
  REGION 1..41: note = Synthetic Peptide
QAEGSLAKATTAPATTRNTGRGGEEKKKEKEKEEQEERETK

SEQ ID NO: 686 - protein, 41 aa, synthetic construct
  REGION 1..41: note = Synthetic Peptide
PQAEGSLAKATTAPATTRNTGRGGEEKKKEKEKEEQEERET

SEQ ID NO: 687 - protein, 41 aa, synthetic construct
  REGION 1..41: note = Synthetic Peptide
QPQAEGSLAKATTAPATTRNTGRGGEEKKKEKEKEEQEERE

SEQ ID NO: 688 - protein, 41 aa, synthetic construct
  REGION 1..41: note = Synthetic Peptide
AQPQAEGSLAKATTAPATTRNTGRGGEEKKKEKEKEEQEER

SEQ ID NO: 689 - protein, 41 aa, synthetic construct
  REGION 1..41: note = Synthetic Peptide
TAQPQAEGSLAKATTAPATTRNTGRGGEEKKKEKEKEEQEE

SEQ ID NO: 690 - protein, 41 aa, synthetic construct
  REGION 1..41: note = Synthetic Peptide
PTAQPQAEGSLAKATTAPATTRNTGRGGEEKKKEKEKEEQE

SEQ ID NO: 691 - protein, 41 aa, synthetic construct
  REGION 1..41: note = Synthetic Peptide
VPTAQPQAEGSLAKATTAPATTRNTGRGGEEKKKEKEKEEQ

SEQ ID NO: 692 - protein, 41 aa, synthetic construct
  REGION 1..41: note = Synthetic Peptide
SVPTAQPQAEGSLAKATTAPATTRNTGRGGEEKKKEKEKEE

SEQ ID NO: 693 - protein, 41 aa, synthetic construct
  REGION 1..41: note = Synthetic Peptide
SSVPTAQPQAEGSLAKATTAPATTRNTGRGGEEKKKEKEKE

SEQ ID NO: 694 - protein, 41 aa, synthetic construct
  REGION 1..41: note = Synthetic Peptide
ASSVPTAQPQAEGSLAKATTAPATTRNTGRGGEEKKKEKEK

SEQ ID NO: 695 - protein, 41 aa, synthetic construct
  REGION 1..41: note = Synthetic Peptide
QASSVPTAQPQAEGSLAKATTAPATTRNTGRGGEEKKKEKE

SEQ ID NO: 696 - protein, 41 aa, synthetic construct
  REGION 1..41: note = Synthetic Peptide
AQASSVPTAQPQAEGSLAKATTAPATTRNTGRGGEEKKKEK

SEQ ID NO: 697 - protein, 41 aa, synthetic construct
  REGION 1..41: note = Synthetic Peptide
KAQASSVPTAQPQAEGSLAKATTAPATTRNTGRGGEEKKKE

SEQ ID NO: 698 - protein, 41 aa, synthetic construct
  REGION 1..41: note = Synthetic Peptide
PKAQASSVPTAQPQAEGSLAKATTAPATTRNTGRGGEEKKK

SEQ ID NO: 699 - protein, 41 aa, synthetic construct
  REGION 1..41: note = Synthetic Peptide
SPKAQASSVPTAQPQAEGSLAKATTAPATTRNTGRGGEEKK

SEQ ID NO: 700 - protein, 41 aa, synthetic construct
  REGION 1..41: note = Synthetic Peptide
ESPKAQASSVPTAQPQAEGSLAKATTAPATTRNTGRGGEEK

SEQ ID NO: 701 - protein, 41 aa, synthetic construct
  REGION 1..41: note = Synthetic Peptide
PESPKAQASSVPTAQPQAEGSLAKATTAPATTRNTGRGGEE

SEQ ID NO: 702 - protein, 41 aa, synthetic construct
  REGION 1..41: note = Synthetic Peptide
WPESPKAQASSVPTAQPQAEGSLAKATTAPATTRNTGRGGE

SEQ ID NO: 703 - protein, 41 aa, synthetic construct
  REGION 1..41: note = Synthetic Peptide
RWPESPKAQASSVPTAQPQAEGSLAKATTAPATTRNTGRGG

SEQ ID NO: 704 - protein, 40 aa, synthetic construct
  REGION 1..40: note = Synthetic Peptide
GRGGEEKKKEKEKEEQEERETKTPECPSHTQPLGVYLLTP

SEQ ID NO: 705 - protein, 40 aa, synthetic construct
  REGION 1..40: note = Synthetic Peptide
TGRGGEEKKKEKEKEEQEERETKTPECPSHTQPLGVYLLT

SEQ ID NO: 706 - protein, 40 aa, synthetic construct
  REGION 1..40: note = Synthetic Peptide
NTGRGGEEKKKEKEKEEQEERETKTPECPSHTQPLGVYLL

SEQ ID NO: 707 - protein, 40 aa, synthetic construct
  REGION 1..40: note = Synthetic Peptide
RNTGRGGEEKKKEKEKEEQEERETKTPECPSHTQPLGVYL

SEQ ID NO: 708 - protein, 40 aa, synthetic construct
  REGION 1..40: note = Synthetic Peptide
TRNTGRGGEEKKKEKEKEEQEERETKTPECPSHTQPLGVY

SEQ ID NO: 709 - protein, 40 aa, synthetic construct
  REGION 1..40: note = Synthetic Peptide
TTRNTGRGGEEKKKEKEKEEQEERETKTPECPSHTQPLGV

SEQ ID NO: 710 - protein, 40 aa, synthetic construct
  REGION 1..40: note = Synthetic Peptide
ATTRNTGRGGEEKKKEKEKEEQEERETKTPECPSHTQPLG

SEQ ID NO: 711 - protein, 40 aa, synthetic construct
  REGION 1..40: note = Synthetic Peptide
PATTRNTGRGGEEKKKEKEKEEQEERETKTPECPSHTQPL

SEQ ID NO: 712 - protein, 40 aa, synthetic construct
  REGION 1..40: note = Synthetic Peptide
APATTRNTGRGGEEKKKEKEKEEQEERETKTPECPSHTQP

SEQ ID NO: 713 - protein, 40 aa, synthetic construct
  REGION 1..40: note = Synthetic Peptide
TAPATTRNTGRGGEEKKKEKEKEEQEERETKTPECPSHTQ

SEQ ID NO: 714 - protein, 40 aa, synthetic construct
  REGION 1..40: note = Synthetic Peptide
TTAPATTRNTGRGGEEKKKEKEKEEQEERETKTPECPSHT

SEQ ID NO: 715 - protein, 40 aa, synthetic construct
  REGION 1..40: note = Synthetic Peptide
ATTAPATTRNTGRGGEEKKKEKEKEEQEERETKTPECPSH

SEQ ID NO: 716 - protein, 40 aa, synthetic construct
  REGION 1..40: note = Synthetic Peptide
KATTAPATTRNTGRGGEEKKKEKEKEEQEERETKTPECPS

SEQ ID NO: 717 - protein, 40 aa, synthetic construct
  REGION 1..40: note = Synthetic Peptide
AKATTAPATTRNTGRGGEEKKKEKEKEEQEERETKTPECP

SEQ ID NO: 718 - protein, 40 aa, synthetic construct
  REGION 1..40: note = Synthetic Peptide
LAKATTAPATTRNTGRGGEEKKKEKEKEEQEERETKTPEC

SEQ ID NO: 719 - protein, 40 aa, synthetic construct
  REGION 1..40: note = Synthetic Peptide
SLAKATTAPATTRNTGRGGEEKKKEKEKEEQEERETKTPE

SEQ ID NO: 720 - protein, 40 aa, synthetic construct
  REGION 1..40: note = Synthetic Peptide
GSLAKATTAPATTRNTGRGGEEKKKEKEKEEQEERETKTP

SEQ ID NO: 721 - protein, 40 aa, synthetic construct
  REGION 1..40: note = Synthetic Peptide
EGSLAKATTAPATTRNTGRGGEEKKKEKEKEEQEERETKT

SEQ ID NO: 722 - protein, 40 aa, synthetic construct
  REGION 1..40: note = Synthetic Peptide
AEGSLAKATTAPATTRNTGRGGEEKKKEKEKEEQEERETK

SEQ ID NO: 723 - protein, 40 aa, synthetic construct
  REGION 1..40: note = Synthetic Peptide
QAEGSLAKATTAPATTRNTGRGGEEKKKEKEKEEQEERET

SEQ ID NO: 724 - protein, 40 aa, synthetic construct
  REGION 1..40: note = Synthetic Peptide
PQAEGSLAKATTAPATTRNTGRGGEEKKKEKEKEEQEERE

SEQ ID NO: 725 - protein, 40 aa, synthetic construct
  REGION 1..40: note = Synthetic Peptide
QPQAEGSLAKATTAPATTRNTGRGGEEKKKEKEKEEQEER

SEQ ID NO: 726 - protein, 40 aa, synthetic construct
  REGION 1..40: note = Synthetic Peptide
AQPQAEGSLAKATTAPATTRNTGRGGEEKKKEKEKEEQEE

SEQ ID NO: 727 - protein, 40 aa, synthetic construct
  REGION 1..40: note = Synthetic Peptide
TAQPQAEGSLAKATTAPATTRNTGRGGEEKKKEKEKEEQE

SEQ ID NO: 728 - protein, 40 aa, synthetic construct
  REGION 1..40: note = Synthetic Peptide
PTAQPQAEGSLAKATTAPATTRNTGRGGEEKKKEKEKEEQ

SEQ ID NO: 729 - protein, 40 aa, synthetic construct
  REGION 1..40: note = Synthetic Peptide
VPTAQPQAEGSLAKATTAPATTRNTGRGGEEKKKEKEKEE

SEQ ID NO: 730 - protein, 40 aa, synthetic construct
  REGION 1..40: note = Synthetic Peptide
SVPTAQPQAEGSLAKATTAPATTRNTGRGGEEKKKEKEKE

SEQ ID NO: 731 - protein, 40 aa, synthetic construct
  REGION 1..40: note = Synthetic Peptide
SSVPTAQPQAEGSLAKATTAPATTRNTGRGGEEKKKEKEK

SEQ ID NO: 732 - protein, 40 aa, synthetic construct
  REGION 1..40: note = Synthetic Peptide
ASSVPTAQPQAEGSLAKATTAPATTRNTGRGGEEKKKEKE

SEQ ID NO: 733 - protein, 40 aa, synthetic construct
  REGION 1..40: note = Synthetic Peptide
QASSVPTAQPQAEGSLAKATTAPATTRNTGRGGEEKKKEK

SEQ ID NO: 734 - protein, 40 aa, synthetic construct
  REGION 1..40: note = Synthetic Peptide
AQASSVPTAQPQAEGSLAKATTAPATTRNTGRGGEEKKKE

SEQ ID NO: 735 - protein, 40 aa, synthetic construct
  REGION 1..40: note = Synthetic Peptide
KAQASSVPTAQPQAEGSLAKATTAPATTRNTGRGGEEKKK

SEQ ID NO: 736 - protein, 40 aa, synthetic construct
  REGION 1..40: note = Synthetic Peptide
PKAQASSVPTAQPQAEGSLAKATTAPATTRNTGRGGEEKK

SEQ ID NO: 737 - protein, 40 aa, synthetic construct
  REGION 1..40: note = Synthetic Peptide
SPKAQASSVPTAQPQAEGSLAKATTAPATTRNTGRGGEEK

SEQ ID NO: 738 - protein, 40 aa, synthetic construct
  REGION 1..40: note = Synthetic Peptide
ESPKAQASSVPTAQPQAEGSLAKATTAPATTRNTGRGGEE

SEQ ID NO: 739 - protein, 40 aa, synthetic construct
  REGION 1..40: note = Synthetic Peptide
PESPKAQASSVPTAQPQAEGSLAKATTAPATTRNTGRGGE

SEQ ID NO: 740 - protein, 40 aa, synthetic construct
  REGION 1..40: note = Synthetic Peptide
WPESPKAQASSVPTAQPQAEGSLAKATTAPATTRNTGRGG

SEQ ID NO: 741 - protein, 40 aa, synthetic construct
  REGION 1..40: note = Synthetic Peptide
RWPESPKAQASSVPTAQPQAEGSLAKATTAPATTRNTGRG

SEQ ID NO: 742 - protein, 39 aa, synthetic construct
  REGION 1..39: note = Synthetic Peptide
RGGEEKKKEKEKEEQEERETKTPECPSHTQPLGVYLLTP

SEQ ID NO: 743 - protein, 39 aa, synthetic construct
  REGION 1..39: note = Synthetic Peptide
GRGGEEKKKEKEKEEQEERETKTPECPSHTQPLGVYLLT

SEQ ID NO: 744 - protein, 39 aa, synthetic construct
  REGION 1..39: note = Synthetic Peptide
TGRGGEEKKKEKEKEEQEERETKTPECPSHTQPLGVYLL

SEQ ID NO: 745 - protein, 39 aa, synthetic construct
  REGION 1..39: note = Synthetic Peptide
NTGRGGEEKKKEKEKEEQEERETKTPECPSHTQPLGVYL

SEQ ID NO: 746 - protein, 39 aa, synthetic construct
  REGION 1..39: note = Synthetic Peptide
RNTGRGGEEKKKEKEKEEQEERETKTPECPSHTQPLGVY

SEQ ID NO: 747 - protein, 39 aa, synthetic construct
  REGION 1..39: note = Synthetic Peptide
TRNTGRGGEEKKKEKEKEEQEERETKTPECPSHTQPLGV

SEQ ID NO: 748 - protein, 39 aa, synthetic construct
  REGION 1..39: note = Synthetic Peptide
TTRNTGRGGEEKKKEKEKEEQEERETKTPECPSHTQPLG

SEQ ID NO: 749 - protein, 39 aa, synthetic construct
  REGION 1..39: note = Synthetic Peptide
ATTRNTGRGGEEKKKEKEKEEQEERETKTPECPSHTQPL

SEQ ID NO: 750 - protein, 39 aa, synthetic construct
  REGION 1..39: note = Synthetic Peptide
PATTRNTGRGGEEKKKEKEKEEQEERETKTPECPSHTQP

SEQ ID NO: 751 - protein, 39 aa, synthetic construct
  REGION 1..39: note = Synthetic Peptide
APATTRNTGRGGEEKKKEKEKEEQEERETKTPECPSHTQ

SEQ ID NO: 752 - protein, 39 aa, synthetic construct
  REGION 1..39: note = Synthetic Peptide
TAPATTRNTGRGGEEKKKEKEKEEQEERETKTPECPSHT

SEQ ID NO: 753 - protein, 39 aa, synthetic construct
  REGION 1..39: note = Synthetic Peptide
TTAPATTRNTGRGGEEKKKEKEKEEQEERETKTPECPSH

SEQ ID NO: 754 - protein, 39 aa, synthetic construct
  REGION 1..39: note = Synthetic Peptide
ATTAPATTRNTGRGGEEKKKEKEKEEQEERETKTPECPS

SEQ ID NO: 755 - protein, 39 aa, synthetic construct
  REGION 1..39: note = Synthetic Peptide
KATTAPATTRNTGRGGEEKKKEKEKEEQEERETKTPECP

SEQ ID NO: 756 - protein, 39 aa, synthetic construct
  REGION 1..39: note = Synthetic Peptide
AKATTAPATTRNTGRGGEEKKKEKEKEEQEERETKTPEC

SEQ ID NO: 757 - protein, 39 aa, synthetic construct
  REGION 1..39: note = Synthetic Peptide
LAKATTAPATTRNTGRGGEEKKKEKEKEEQEERETKTPE

SEQ ID NO: 758 - protein, 39 aa, synthetic construct
  REGION 1..39: note = Synthetic Peptide
SLAKATTAPATTRNTGRGGEEKKKEKEKEEQEERETKTP

SEQ ID NO: 759 - protein, 39 aa, synthetic construct
  REGION 1..39: note = Synthetic Peptide
GSLAKATTAPATTRNTGRGGEEKKKEKEKEEQEERETKT

SEQ ID NO: 760 - protein, 39 aa, synthetic construct
  REGION 1..39: note = Synthetic Peptide
EGSLAKATTAPATTRNTGRGGEEKKKEKEKEEQEERETK

SEQ ID NO: 761 - protein, 39 aa, synthetic construct
  REGION 1..39: note = Synthetic Peptide
AEGSLAKATTAPATTRNTGRGGEEKKKEKEKEEQEERET

SEQ ID NO: 762 - protein, 39 aa, synthetic construct
  REGION 1..39: note = Synthetic Peptide
QAEGSLAKATTAPATTRNTGRGGEEKKKEKEKEEQEERE

SEQ ID NO: 763 - protein, 39 aa, synthetic construct
  REGION 1..39: note = Synthetic Peptide
PQAEGSLAKATTAPATTRNTGRGGEEKKKEKEKEEQEER

SEQ ID NO: 764 - protein, 39 aa, synthetic construct
  REGION 1..39: note = Synthetic Peptide
QPQAEGSLAKATTAPATTRNTGRGGEEKKKEKEKEEQEE

SEQ ID NO: 765 - protein, 39 aa, synthetic construct
  REGION 1..39: note = Synthetic Peptide
AQPQAEGSLAKATTAPATTRNTGRGGEEKKKEKEKEEQE

SEQ ID NO: 766 - protein, 39 aa, synthetic construct
  REGION 1..39: note = Synthetic Peptide
TAQPQAEGSLAKATTAPATTRNTGRGGEEKKKEKEKEEQ

SEQ ID NO: 767 - protein, 39 aa, synthetic construct
  REGION 1..39: note = Synthetic Peptide
PTAQPQAEGSLAKATTAPATTRNTGRGGEEKKKEKEKEE

SEQ ID NO: 768 - protein, 39 aa, synthetic construct
  REGION 1..39: note = Synthetic Peptide
VPTAQPQAEGSLAKATTAPATTRNTGRGGEEKKKEKEKE

SEQ ID NO: 769 - protein, 39 aa, synthetic construct
  REGION 1..39: note = Synthetic Peptide
SVPTAQPQAEGSLAKATTAPATTRNTGRGGEEKKKEKEK

SEQ ID NO: 770 - protein, 39 aa, synthetic construct
  REGION 1..39: note = Synthetic Peptide
SSVPTAQPQAEGSLAKATTAPATTRNTGRGGEEKKKEKE

SEQ ID NO: 771 - protein, 39 aa, synthetic construct
  REGION 1..39: note = Synthetic Peptide
ASSVPTAQPQAEGSLAKATTAPATTRNTGRGGEEKKKEK

SEQ ID NO: 772 - protein, 39 aa, synthetic construct
  REGION 1..39: note = Synthetic Peptide
QASSVPTAQPQAEGSLAKATTAPATTRNTGRGGEEKKKE

SEQ ID NO: 773 - protein, 39 aa, synthetic construct
  REGION 1..39: note = Synthetic Peptide
AQASSVPTAQPQAEGSLAKATTAPATTRNTGRGGEEKKK

SEQ ID NO: 774 - protein, 39 aa, synthetic construct
  REGION 1..39: note = Synthetic Peptide
KAQASSVPTAQPQAEGSLAKATTAPATTRNTGRGGEEKK

SEQ ID NO: 775 - protein, 39 aa, synthetic construct
  REGION 1..39: note = Synthetic Peptide
PKAQASSVPTAQPQAEGSLAKATTAPATTRNTGRGGEEK

SEQ ID NO: 776 - protein, 39 aa, synthetic construct
  REGION 1..39: note = Synthetic Peptide
SPKAQASSVPTAQPQAEGSLAKATTAPATTRNTGRGGEE

SEQ ID NO: 777 - protein, 39 aa, synthetic construct
  REGION 1..39: note = Synthetic Peptide
ESPKAQASSVPTAQPQAEGSLAKATTAPATTRNTGRGGE

SEQ ID NO: 778 - protein, 39 aa, synthetic construct
  REGION 1..39: note = Synthetic Peptide
PESPKAQASSVPTAQPQAEGSLAKATTAPATTRNTGRGG

SEQ ID NO: 779 - protein, 39 aa, synthetic construct
  REGION 1..39: note = Synthetic Peptide
WPESPKAQASSVPTAQPQAEGSLAKATTAPATTRNTGRG

SEQ ID NO: 780 - protein, 39 aa, synthetic construct
  REGION 1..39: note = Synthetic Peptide
RWPESPKAQASSVPTAQPQAEGSLAKATTAPATTRNTGR

SEQ ID NO: 781 - protein, 38 aa, synthetic construct
  REGION 1..38: note = Synthetic Peptide
GGEEKKKEKEKEEQEERETKTPECPSHTQPLGVYLLTP

SEQ ID NO: 782 - protein, 38 aa, synthetic construct
  REGION 1..38: note = Synthetic Peptide
RGGEEKKKEKEKEEQEERETKTPECPSHTQPLGVYLLT

SEQ ID NO: 783 - protein, 38 aa, synthetic construct
  REGION 1..38: note = Synthetic Peptide
GRGGEEKKKEKEKEEQEERETKTPECPSHTQPLGVYLL

SEQ ID NO: 784 - protein, 38 aa, synthetic construct
  REGION 1..38: note = Synthetic Peptide
TGRGGEEKKKEKEKEEQEERETKTPECPSHTQPLGVYL

SEQ ID NO: 785 - protein, 38 aa, synthetic construct
  REGION 1..38: note = Synthetic Peptide
NTGRGGEEKKKEKEKEEQEERETKTPECPSHTQPLGVY

SEQ ID NO: 786 - protein, 38 aa, synthetic construct
  REGION 1..38: note = Synthetic Peptide
RNTGRGGEEKKKEKEKEEQEERETKTPECPSHTQPLGV

SEQ ID NO: 787 - protein, 38 aa, synthetic construct
  REGION 1..38: note = Synthetic Peptide
TRNTGRGGEEKKKEKEKEEQEERETKTPECPSHTQPLG

SEQ ID NO: 788 - protein, 38 aa, synthetic construct
  REGION 1..38: note = Synthetic Peptide
TTRNTGRGGEEKKKEKEKEEQEERETKTPECPSHTQPL

SEQ ID NO: 789 - protein, 38 aa, synthetic construct
  REGION 1..38: note = Synthetic Peptide
ATTRNTGRGGEEKKKEKEKEEQEERETKTPECPSHTQP

SEQ ID NO: 790 - protein, 38 aa, synthetic construct
  REGION 1..38: note = Synthetic Peptide
PATTRNTGRGGEEKKKEKEKEEQEERETKTPECPSHTQ

SEQ ID NO: 791 - protein, 38 aa, synthetic construct
  REGION 1..38: note = Synthetic Peptide
APATTRNTGRGGEEKKKEKEKEEQEERETKTPECPSHT

SEQ ID NO: 792 - protein, 38 aa, synthetic construct
  REGION 1..38: note = Synthetic Peptide
TAPATTRNTGRGGEEKKKEKEKEEQEERETKTPECPSH

SEQ ID NO: 793 - protein, 38 aa, synthetic construct
  REGION 1..38: note = Synthetic Peptide
TTAPATTRNTGRGGEEKKKEKEKEEQEERETKTPECPS

SEQ ID NO: 794 - protein, 38 aa, synthetic construct
  REGION 1..38: note = Synthetic Peptide
ATTAPATTRNTGRGGEEKKKEKEKEEQEERETKTPECP

SEQ ID NO: 795 - protein, 38 aa, synthetic construct
  REGION 1..38: note = Synthetic Peptide
KATTAPATTRNTGRGGEEKKKEKEKEEQEERETKTPEC

SEQ ID NO: 796 - protein, 38 aa, synthetic construct
  REGION 1..38: note = Synthetic Peptide
AKATTAPATTRNTGRGGEEKKKEKEKEEQEERETKTPE

SEQ ID NO: 797 - protein, 38 aa, synthetic construct
  REGION 1..38: note = Synthetic Peptide
LAKATTAPATTRNTGRGGEEKKKEKEKEEQEERETKTP

SEQ ID NO: 798 - protein, 38 aa, synthetic construct
  REGION 1..38: note = Synthetic Peptide
SLAKATTAPATTRNTGRGGEEKKKEKEKEEQEERETKT

SEQ ID NO: 799 - protein, 38 aa, synthetic construct
  REGION 1..38: note = Synthetic Peptide
GSLAKATTAPATTRNTGRGGEEKKKEKEKEEQEERETK

SEQ ID NO: 800 - protein, 38 aa, synthetic construct
  REGION 1..38: note = Synthetic Peptide
EGSLAKATTAPATTRNTGRGGEEKKKEKEKEEQEERET

SEQ ID NO: 801 - protein, 38 aa, synthetic construct
  REGION 1..38: note = Synthetic Peptide
AEGSLAKATTAPATTRNTGRGGEEKKKEKEKEEQEERE

SEQ ID NO: 802 - protein, 38 aa, synthetic construct
  REGION 1..38: note = Synthetic Peptide
QAEGSLAKATTAPATTRNTGRGGEEKKKEKEKEEQEER

SEQ ID NO: 803 - protein, 38 aa, synthetic construct
  REGION 1..38: note = Synthetic Peptide
PQAEGSLAKATTAPATTRNTGRGGEEKKKEKEKEEQEE

SEQ ID NO: 804 - protein, 38 aa, synthetic construct
  REGION 1..38: note = Synthetic Peptide
QPQAEGSLAKATTAPATTRNTGRGGEEKKKEKEKEEQE

SEQ ID NO: 805 - protein, 38 aa, synthetic construct
  REGION 1..38: note = Synthetic Peptide
AQPQAEGSLAKATTAPATTRNTGRGGEEKKKEKEKEEQ

SEQ ID NO: 806 - protein, 38 aa, synthetic construct
  REGION 1..38: note = Synthetic Peptide
TAQPQAEGSLAKATTAPATTRNTGRGGEEKKKEKEKEE

SEQ ID NO: 807 - protein, 38 aa, synthetic construct
  REGION 1..38: note = Synthetic Peptide
PTAQPQAEGSLAKATTAPATTRNTGRGGEEKKKEKEKE

SEQ ID NO: 808 - protein, 38 aa, synthetic construct
  REGION 1..38: note = Synthetic Peptide
VPTAQPQAEGSLAKATTAPATTRNTGRGGEEKKKEKEK

SEQ ID NO: 809 - protein, 38 aa, synthetic construct
  REGION 1..38: note = Synthetic Peptide
SVPTAQPQAEGSLAKATTAPATTRNTGRGGEEKKKEKE

SEQ ID NO: 810 - protein, 38 aa, synthetic construct
  REGION 1..38: note = Synthetic Peptide
SSVPTAQPQAEGSLAKATTAPATTRNTGRGGEEKKKEK

SEQ ID NO: 811 - protein, 38 aa, synthetic construct
  REGION 1..38: note = Synthetic Peptide
ASSVPTAQPQAEGSLAKATTAPATTRNTGRGGEEKKKE

SEQ ID NO: 812 - protein, 38 aa, synthetic construct
  REGION 1..38: note = Synthetic Peptide
QASSVPTAQPQAEGSLAKATTAPATTRNTGRGGEEKKK

SEQ ID NO: 813 - protein, 38 aa, synthetic construct
  REGION 1..38: note = Synthetic Peptide
AQASSVPTAQPQAEGSLAKATTAPATTRNTGRGGEEKK

SEQ ID NO: 814 - protein, 38 aa, synthetic construct
  REGION 1..38: note = Synthetic Peptide
KAQASSVPTAQPQAEGSLAKATTAPATTRNTGRGGEEK

SEQ ID NO: 815 - protein, 38 aa, synthetic construct
  REGION 1..38: note = Synthetic Peptide
PKAQASSVPTAQPQAEGSLAKATTAPATTRNTGRGGEE

SEQ ID NO: 816 - protein, 38 aa, synthetic construct
  REGION 1..38: note = Synthetic Peptide
SPKAQASSVPTAQPQAEGSLAKATTAPATTRNTGRGGE

SEQ ID NO: 817 - protein, 38 aa, synthetic construct
  REGION 1..38: note = Synthetic Peptide
ESPKAQASSVPTAQPQAEGSLAKATTAPATTRNTGRGG

SEQ ID NO: 818 - protein, 38 aa, synthetic construct
  REGION 1..38: note = Synthetic Peptide
PESPKAQASSVPTAQPQAEGSLAKATTAPATTRNTGRG

SEQ ID NO: 819 - protein, 38 aa, synthetic construct
  REGION 1..38: note = Synthetic Peptide
WPESPKAQASSVPTAQPQAEGSLAKATTAPATTRNTGR

SEQ ID NO: 820 - protein, 38 aa, synthetic construct
  REGION 1..38: note = Synthetic Peptide
RWPESPKAQASSVPTAQPQAEGSLAKATTAPATTRNTG

SEQ ID NO: 821 - protein, 37 aa, synthetic construct
  REGION 1..37: note = Synthetic Peptide
GEEKKKEKEKEEQEERETKTPECPSHTQPLGVYLLTP

SEQ ID NO: 822 - protein, 37 aa, synthetic construct
  REGION 1..37: note = Synthetic Peptide
GGEEKKKEKEKEEQEERETKTPECPSHTQPLGVYLLT

SEQ ID NO: 823 - protein, 37 aa, synthetic construct
  REGION 1..37: note = Synthetic Peptide
RGGEEKKKEKEKEEQEERETKTPECPSHTQPLGVYLL

SEQ ID NO: 824 - protein, 37 aa, synthetic construct
  REGION 1..37: note = Synthetic Peptide
GRGGEEKKKEKEKEEQEERETKTPECPSHTQPLGVYL

SEQ ID NO: 825 - protein, 37 aa, synthetic construct
  REGION 1..37: note = Synthetic Peptide
TGRGGEEKKKEKEKEEQEERETKTPECPSHTQPLGVY

SEQ ID NO: 826 - protein, 37 aa, synthetic construct
  REGION 1..37: note = Synthetic Peptide
NTGRGGEEKKKEKEKEEQEERETKTPECPSHTQPLGV

SEQ ID NO: 827 - protein, 37 aa, synthetic construct
  REGION 1..37: note = Synthetic Peptide
RNTGRGGEEKKKEKEKEEQEERETKTPECPSHTQPLG

SEQ ID NO: 828 - protein, 37 aa, synthetic construct
  REGION 1..37: note = Synthetic Peptide
TRNTGRGGEEKKKEKEKEEQEERETKTPECPSHTQPL

SEQ ID NO: 829 - protein, 37 aa, synthetic construct
  REGION 1..37: note = Synthetic Peptide
TTRNTGRGGEEKKKEKEKEEQEERETKTPECPSHTQP

SEQ ID NO: 830 - protein, 37 aa, synthetic construct
  REGION 1..37: note = Synthetic Peptide
ATTRNTGRGGEEKKKEKEKEEQEERETKTPECPSHTQ

SEQ ID NO: 831 - protein, 37 aa, synthetic construct
  REGION 1..37: note = Synthetic Peptide
PATTRNTGRGGEEKKKEKEKEEQEERETKTPECPSHT

SEQ ID NO: 832 - protein, 37 aa, synthetic construct
  REGION 1..37: note = Synthetic Peptide
APATTRNTGRGGEEKKKEKEKEEQEERETKTPECPSH

SEQ ID NO: 833 - protein, 37 aa, synthetic construct
  REGION 1..37: note = Synthetic Peptide
TAPATTRNTGRGGEEKKKEKEKEEQEERETKTPECPS

SEQ ID NO: 834 - protein, 37 aa, synthetic construct
  REGION 1..37: note = Synthetic Peptide
TTAPATTRNTGRGGEEKKKEKEKEEQEERETKTPECP

SEQ ID NO: 835 - protein, 37 aa, synthetic construct
  REGION 1..37: note = Synthetic Peptide
ATTAPATTRNTGRGGEEKKKEKEKEEQEERETKTPEC

SEQ ID NO: 836 - protein, 37 aa, synthetic construct
  REGION 1..37: note = Synthetic Peptide
KATTAPATTRNTGRGGEEKKKEKEKEEQEERETKTPE

SEQ ID NO: 837 - protein, 37 aa, synthetic construct
  REGION 1..37: note = Synthetic Peptide
AKATTAPATTRNTGRGGEEKKKEKEKEEQEERETKTP

SEQ ID NO: 838 - protein, 37 aa, synthetic construct
  REGION 1..37: note = Synthetic Peptide
LAKATTAPATTRNTGRGGEEKKKEKEKEEQEERETKT

SEQ ID NO: 839 - protein, 37 aa, synthetic construct
  REGION 1..37: note = Synthetic Peptide
SLAKATTAPATTRNTGRGGEEKKKEKEKEEQEERETK

SEQ ID NO: 840 - protein, 37 aa, synthetic construct
  REGION 1..37: note = Synthetic Peptide
GSLAKATTAPATTRNTGRGGEEKKKEKEKEEQEERET

SEQ ID NO: 841 - protein, 37 aa, synthetic construct
  REGION 1..37: note = Synthetic Peptide
EGSLAKATTAPATTRNTGRGGEEKKKEKEKEEQEERE

SEQ ID NO: 842 - protein, 37 aa, synthetic construct
  REGION 1..37: note = Synthetic Peptide
AEGSLAKATTAPATTRNTGRGGEEKKKEKEKEEQEER

SEQ ID NO: 843 - protein, 37 aa, synthetic construct
  REGION 1..37: note = Synthetic Peptide
QAEGSLAKATTAPATTRNTGRGGEEKKKEKEKEEQEE

SEQ ID NO: 844 - protein, 37 aa, synthetic construct
  REGION 1..37: note = Synthetic Peptide
PQAEGSLAKATTAPATTRNTGRGGEEKKKEKEKEEQE

SEQ ID NO: 845 - protein, 37 aa, synthetic construct
  REGION 1..37: note = Synthetic Peptide
QPQAEGSLAKATTAPATTRNTGRGGEEKKKEKEKEEQ

SEQ ID NO: 846 - protein, 37 aa, synthetic construct
  REGION 1..37: note = Synthetic Peptide
AQPQAEGSLAKATTAPATTRNTGRGGEEKKKEKEKEE

SEQ ID NO: 847 - protein, 37 aa, synthetic construct
  REGION 1..37: note = Synthetic Peptide
TAQPQAEGSLAKATTAPATTRNTGRGGEEKKKEKEKE

SEQ ID NO: 848 - protein, 37 aa, synthetic construct
  REGION 1..37: note = Synthetic Peptide
PTAQPQAEGSLAKATTAPATTRNTGRGGEEKKKEKEK

SEQ ID NO: 849 - protein, 37 aa, synthetic construct
  REGION 1..37: note = Synthetic Peptide
VPTAQPQAEGSLAKATTAPATTRNTGRGGEEKKKEKE

SEQ ID NO: 850 - protein, 37 aa, synthetic construct
  REGION 1..37: note = Synthetic Peptide
SVPTAQPQAEGSLAKATTAPATTRNTGRGGEEKKKEK

SEQ ID NO: 851 - protein, 37 aa, synthetic construct
  REGION 1..37: note = Synthetic Peptide
SSVPTAQPQAEGSLAKATTAPATTRNTGRGGEEKKKE

SEQ ID NO: 852 - protein, 37 aa, synthetic construct
  REGION 1..37: note = Synthetic Peptide
ASSVPTAQPQAEGSLAKATTAPATTRNTGRGGEEKKK

SEQ ID NO: 853 - protein, 37 aa, synthetic construct
  REGION 1..37: note = Synthetic Peptide
QASSVPTAQPQAEGSLAKATTAPATTRNTGRGGEEKK

SEQ ID NO: 854 - protein, 37 aa, synthetic construct
  REGION 1..37: note = Synthetic Peptide
AQASSVPTAQPQAEGSLAKATTAPATTRNTGRGGEEK

SEQ ID NO: 855 - protein, 37 aa, synthetic construct
  REGION 1..37: note = Synthetic Peptide
KAQASSVPTAQPQAEGSLAKATTAPATTRNTGRGGEE

SEQ ID NO: 856 - protein, 37 aa, synthetic construct
  REGION 1..37: note = Synthetic Peptide
PKAQASSVPTAQPQAEGSLAKATTAPATTRNTGRGGE

SEQ ID NO: 857 - protein, 37 aa, synthetic construct
  REGION 1..37: note = Synthetic Peptide
SPKAQASSVPTAQPQAEGSLAKATTAPATTRNTGRGG

SEQ ID NO: 858 - protein, 37 aa, synthetic construct
  REGION 1..37: note = Synthetic Peptide
ESPKAQASSVPTAQPQAEGSLAKATTAPATTRNTGRG

SEQ ID NO: 859 - protein, 37 aa, synthetic construct
  REGION 1..37: note = Synthetic Peptide
PESPKAQASSVPTAQPQAEGSLAKATTAPATTRNTGR

SEQ ID NO: 860 - protein, 37 aa, synthetic construct
  REGION 1..37: note = Synthetic Peptide
WPESPKAQASSVPTAQPQAEGSLAKATTAPATTRNTG

SEQ ID NO: 861 - protein, 37 aa, synthetic construct
  REGION 1..37: note = Synthetic Peptide
RWPESPKAQASSVPTAQPQAEGSLAKATTAPATTRNT

SEQ ID NO: 862 - protein, 36 aa, synthetic construct
  REGION 1..36: note = Synthetic Peptide
EEKKKEKEKEEQEERETKTPECPSHTQPLGVYLLTP

SEQ ID NO: 863 - protein, 36 aa, synthetic construct
  REGION 1..36: note = Synthetic Peptide
GEEKKKEKEKEEQEERETKTPECPSHTQPLGVYLLT

SEQ ID NO: 864 - protein, 36 aa, synthetic construct
  REGION 1..36: note = Synthetic Peptide
GGEEKKKEKEKEEQEERETKTPECPSHTQPLGVYLL

SEQ ID NO: 865 - protein, 36 aa, synthetic construct
  REGION 1..36: note = Synthetic Peptide
RGGEEKKKEKEKEEQEERETKTPECPSHTQPLGVYL

SEQ ID NO: 866 - protein, 36 aa, synthetic construct
  REGION 1..36: note = Synthetic Peptide
GRGGEEKKKEKEKEEQEERETKTPECPSHTQPLGVY

SEQ ID NO: 867 - protein, 36 aa, synthetic construct
  REGION 1..36: note = Synthetic Peptide
TGRGGEEKKKEKEKEEQEERETKTPECPSHTQPLGV

SEQ ID NO: 868 - protein, 36 aa, synthetic construct
  REGION 1..36: note = Synthetic Peptide
NTGRGGEEKKKEKEKEEQEERETKTPECPSHTQPLG

SEQ ID NO: 869 - protein, 36 aa, synthetic construct
  REGION 1..36: note = Synthetic Peptide
RNTGRGGEEKKKEKEKEEQEERETKTPECPSHTQPL

SEQ ID NO: 870 - protein, 36 aa, synthetic construct
  REGION 1..36: note = Synthetic Peptide
TRNTGRGGEEKKKEKEKEEQEERETKTPECPSHTQP

SEQ ID NO: 871 - protein, 36 aa, synthetic construct
  REGION 1..36: note = Synthetic Peptide
TTRNTGRGGEEKKKEKEKEEQEERETKTPECPSHTQ

SEQ ID NO: 872 - protein, 36 aa, synthetic construct
  REGION 1..36: note = Synthetic Peptide
ATTRNTGRGGEEKKKEKEKEEQEERETKTPECPSHT

SEQ ID NO: 873 - protein, 36 aa, synthetic construct
  REGION 1..36: note = Synthetic Peptide
PATTRNTGRGGEEKKKEKEKEEQEERETKTPECPSH

SEQ ID NO: 874 - protein, 36 aa, synthetic construct
  REGION 1..36: note = Synthetic Peptide
APATTRNTGRGGEEKKKEKEKEEQEERETKTPECPS

SEQ ID NO: 875 - protein, 36 aa, synthetic construct
  REGION 1..36: note = Synthetic Peptide
TAPATTRNTGRGGEEKKKEKEKEEQEERETKTPECP

SEQ ID NO: 876 - protein, 36 aa, synthetic construct
  REGION 1..36: note = Synthetic Peptide
TTAPATTRNTGRGGEEKKKEKEKEEQEERETKTPEC

SEQ ID NO: 877 - protein, 36 aa, synthetic construct
  REGION 1..36: note = Synthetic Peptide
ATTAPATTRNTGRGGEEKKKEKEKEEQEERETKTPE

SEQ ID NO: 878 - protein, 36 aa, synthetic construct
  REGION 1..36: note = Synthetic Peptide
KATTAPATTRNTGRGGEEKKKEKEKEEQEERETKTP

SEQ ID NO: 879 - protein, 36 aa, synthetic construct
  REGION 1..36: note = Synthetic Peptide
AKATTAPATTRNTGRGGEEKKKEKEKEEQEERETKT

SEQ ID NO: 880 - protein, 36 aa, synthetic construct
  REGION 1..36: note = Synthetic Peptide
LAKATTAPATTRNTGRGGEEKKKEKEKEEQEERETK

SEQ ID NO: 881 - protein, 36 aa, synthetic construct
  REGION 1..36: note = Synthetic Peptide
SLAKATTAPATTRNTGRGGEEKKKEKEKEEQEERET

SEQ ID NO: 882 - protein, 36 aa, synthetic construct
  REGION 1..36: note = Synthetic Peptide
GSLAKATTAPATTRNTGRGGEEKKKEKEKEEQEERE

SEQ ID NO: 883 - protein, 36 aa, synthetic construct
  REGION 1..36: note = Synthetic Peptide
EGSLAKATTAPATTRNTGRGGEEKKKEKEKEEQEER

SEQ ID NO: 884 - protein, 36 aa, synthetic construct
  REGION 1..36: note = Synthetic Peptide
AEGSLAKATTAPATTRNTGRGGEEKKKEKEKEEQEE

SEQ ID NO: 885 - protein, 36 aa, synthetic construct
  REGION 1..36: note = Synthetic Peptide
QAEGSLAKATTAPATTRNTGRGGEEKKKEKEKEEQE

SEQ ID NO: 886 - protein, 36 aa, synthetic construct
  REGION 1..36: note = Synthetic Peptide
PQAEGSLAKATTAPATTRNTGRGGEEKKKEKEKEEQ

SEQ ID NO: 887 - protein, 36 aa, synthetic construct
  REGION 1..36: note = Synthetic Peptide
QPQAEGSLAKATTAPATTRNTGRGGEEKKKEKEKEE

SEQ ID NO: 888 - protein, 36 aa, synthetic construct
  REGION 1..36: note = Synthetic Peptide
AQPQAEGSLAKATTAPATTRNTGRGGEEKKKEKEKE

SEQ ID NO: 889 - protein, 36 aa, synthetic construct
  REGION 1..36: note = Synthetic Peptide
TAQPQAEGSLAKATTAPATTRNTGRGGEEKKKEKEK

SEQ ID NO: 890 - protein, 36 aa, synthetic construct
  REGION 1..36: note = Synthetic Peptide
PTAQPQAEGSLAKATTAPATTRNTGRGGEEKKKEKE

SEQ ID NO: 891 - protein, 36 aa, synthetic construct
  REGION 1..36: note = Synthetic Peptide
VPTAQPQAEGSLAKATTAPATTRNTGRGGEEKKKEK

SEQ ID NO: 892 - protein, 36 aa, synthetic construct
  REGION 1..36: note = Synthetic Peptide
SVPTAQPQAEGSLAKATTAPATTRNTGRGGEEKKKE

SEQ ID NO: 893 - protein, 36 aa, synthetic construct
  REGION 1..36: note = Synthetic Peptide
SSVPTAQPQAEGSLAKATTAPATTRNTGRGGEEKKK

SEQ ID NO: 894 - protein, 36 aa, synthetic construct
  REGION 1..36: note = Synthetic Peptide
ASSVPTAQPQAEGSLAKATTAPATTRNTGRGGEEKK

SEQ ID NO: 895 - protein, 36 aa, synthetic construct
  REGION 1..36: note = Synthetic Peptide
QASSVPTAQPQAEGSLAKATTAPATTRNTGRGGEEK

SEQ ID NO: 896 - protein, 36 aa, synthetic construct
  REGION 1..36: note = Synthetic Peptide
AQASSVPTAQPQAEGSLAKATTAPATTRNTGRGGEE

SEQ ID NO: 897 - protein, 36 aa, synthetic construct
  REGION 1..36: note = Synthetic Peptide
KAQASSVPTAQPQAEGSLAKATTAPATTRNTGRGGE

SEQ ID NO: 898 - protein, 36 aa, synthetic construct
  REGION 1..36: note = Synthetic Peptide
PKAQASSVPTAQPQAEGSLAKATTAPATTRNTGRGG

SEQ ID NO: 899 - protein, 36 aa, synthetic construct
  REGION 1..36: note = Synthetic Peptide
SPKAQASSVPTAQPQAEGSLAKATTAPATTRNTGRG

SEQ ID NO: 900 - protein, 36 aa, synthetic construct
  REGION 1..36: note = Synthetic Peptide
ESPKAQASSVPTAQPQAEGSLAKATTAPATTRNTGR

SEQ ID NO: 901 - protein, 36 aa, synthetic construct
  REGION 1..36: note = Synthetic Peptide
PESPKAQASSVPTAQPQAEGSLAKATTAPATTRNTG

SEQ ID NO: 902 - protein, 36 aa, synthetic construct
  REGION 1..36: note = Synthetic Peptide
WPESPKAQASSVPTAQPQAEGSLAKATTAPATTRNT

SEQ ID NO: 903 - protein, 36 aa, synthetic construct
  REGION 1..36: note = Synthetic Peptide
RWPESPKAQASSVPTAQPQAEGSLAKATTAPATTRN

SEQ ID NO: 904 - protein, 35 aa, synthetic construct
  REGION 1..35: note = Synthetic Peptide
EKKKEKEKEEQEERETKTPECPSHTQPLGVYLLTP

SEQ ID NO: 905 - protein, 35 aa, synthetic construct
  REGION 1..35: note = Synthetic Peptide
EEKKKEKEKEEQEERETKTPECPSHTQPLGVYLLT

SEQ ID NO: 906 - protein, 35 aa, synthetic construct
  REGION 1..35: note = Synthetic Peptide
GEEKKKEKEKEEQEERETKTPECPSHTQPLGVYLL

SEQ ID NO: 907 - protein, 35 aa, synthetic construct
  REGION 1..35: note = Synthetic Peptide
GGEEKKKEKEKEEQEERETKTPECPSHTQPLGVYL

SEQ ID NO: 908 - protein, 35 aa, synthetic construct
  REGION 1..35: note = Synthetic Peptide
RGGEEKKKEKEKEEQEERETKTPECPSHTQPLGVY

SEQ ID NO: 909 - protein, 35 aa, synthetic construct
  REGION 1..35: note = Synthetic Peptide
GRGGEEKKKEKEKEEQEERETKTPECPSHTQPLGV

SEQ ID NO: 910 - protein, 35 aa, synthetic construct
  REGION 1..35: note = Synthetic Peptide
TGRGGEEKKKEKEKEEQEERETKTPECPSHTQPLG

SEQ ID NO: 911 - protein, 35 aa, synthetic construct
  REGION 1..35: note = Synthetic Peptide
NTGRGGEEKKKEKEKEEQEERETKTPECPSHTQPL

SEQ ID NO: 912 - protein, 35 aa, synthetic construct
  REGION 1..35: note = Synthetic Peptide
RNTGRGGEEKKKEKEKEEQEERETKTPECPSHTQP

SEQ ID NO: 913 - protein, 35 aa, synthetic construct
  REGION 1..35: note = Synthetic Peptide
TRNTGRGGEEKKKEKEKEEQEERETKTPECPSHTQ

SEQ ID NO: 914 - protein, 35 aa, synthetic construct
  REGION 1..35: note = Synthetic Peptide
TTRNTGRGGEEKKKEKEKEEQEERETKTPECPSHT

SEQ ID NO: 915 - protein, 35 aa, synthetic construct
  REGION 1..35: note = Synthetic Peptide
ATTRNTGRGGEEKKKEKEKEEQEERETKTPECPSH

SEQ ID NO: 916 - protein, 35 aa, synthetic construct
  REGION 1..35: note = Synthetic Peptide
PATTRNTGRGGEEKKKEKEKEEQEERETKTPECPS

SEQ ID NO: 917 - protein, 35 aa, synthetic construct
  REGION 1..35: note = Synthetic Peptide
APATTRNTGRGGEEKKKEKEKEEQEERETKTPECP

SEQ ID NO: 918 - protein, 35 aa, synthetic construct
  REGION 1..35: note = Synthetic Peptide
TAPATTRNTGRGGEEKKKEKEKEEQEERETKTPEC

SEQ ID NO: 919 - protein, 35 aa, synthetic construct
  REGION 1..35: note = Synthetic Peptide
TTAPATTRNTGRGGEEKKKEKEKEEQEERETKTPE

SEQ ID NO: 920 - protein, 35 aa, synthetic construct
  REGION 1..35: note = Synthetic Peptide
ATTAPATTRNTGRGGEEKKKEKEKEEQEERETKTP

SEQ ID NO: 921 - protein, 35 aa, synthetic construct
  REGION 1..35: note = Synthetic Peptide
KATTAPATTRNTGRGGEEKKKEKEKEEQEERETKT

SEQ ID NO: 922 - protein, 35 aa, synthetic construct
  REGION 1..35: note = Synthetic Peptide
AKATTAPATTRNTGRGGEEKKKEKEKEEQEERETK

SEQ ID NO: 923 - protein, 35 aa, synthetic construct
  REGION 1..35: note = Synthetic Peptide
LAKATTAPATTRNTGRGGEEKKKEKEKEEQEERET

SEQ ID NO: 924 - protein, 35 aa, synthetic construct
  REGION 1..35: note = Synthetic Peptide
SLAKATTAPATTRNTGRGGEEKKKEKEKEEQEERE

SEQ ID NO: 925 - protein, 35 aa, synthetic construct
  REGION 1..35: note = Synthetic Peptide
GSLAKATTAPATTRNTGRGGEEKKKEKEKEEQEER

SEQ ID NO: 926 - protein, 35 aa, synthetic construct
  REGION 1..35: note = Synthetic Peptide
EGSLAKATTAPATTRNTGRGGEEKKKEKEKEEQEE

SEQ ID NO: 927 - protein, 35 aa, synthetic construct
  REGION 1..35: note = Synthetic Peptide
AEGSLAKATTAPATTRNTGRGGEEKKKEKEKEEQE

SEQ ID NO: 928 - protein, 35 aa, synthetic construct
  REGION 1..35: note = Synthetic Peptide
QAEGSLAKATTAPATTRNTGRGGEEKKKEKEKEEQ

SEQ ID NO: 929 - protein, 35 aa, synthetic construct
  REGION 1..35: note = Synthetic Peptide
PQAEGSLAKATTAPATTRNTGRGGEEKKKEKEKEE

SEQ ID NO: 930 - protein, 35 aa, synthetic construct
  REGION 1..35: note = Synthetic Peptide
QPQAEGSLAKATTAPATTRNTGRGGEEKKKEKEKE

SEQ ID NO: 931 - protein, 35 aa, synthetic construct
  REGION 1..35: note = Synthetic Peptide
AQPQAEGSLAKATTAPATTRNTGRGGEEKKKEKEK

SEQ ID NO: 932 - protein, 35 aa, synthetic construct
  REGION 1..35: note = Synthetic Peptide
TAQPQAEGSLAKATTAPATTRNTGRGGEEKKKEKE

SEQ ID NO: 933 - protein, 35 aa, synthetic construct
  REGION 1..35: note = Synthetic Peptide
PTAQPQAEGSLAKATTAPATTRNTGRGGEEKKKEK

SEQ ID NO: 934 - protein, 35 aa, synthetic construct
  REGION 1..35: note = Synthetic Peptide
VPTAQPQAEGSLAKATTAPATTRNTGRGGEEKKKE

SEQ ID NO: 935 - protein, 35 aa, synthetic construct
  REGION 1..35: note = Synthetic Peptide
SVPTAQPQAEGSLAKATTAPATTRNTGRGGEEKKK

SEQ ID NO: 936 - protein, 35 aa, synthetic construct
  REGION 1..35: note = Synthetic Peptide
SSVPTAQPQAEGSLAKATTAPATTRNTGRGGEEKK

SEQ ID NO: 937 - protein, 35 aa, synthetic construct
  REGION 1..35: note = Synthetic Peptide
ASSVPTAQPQAEGSLAKATTAPATTRNTGRGGEEK

SEQ ID NO: 938 - protein, 35 aa, synthetic construct
  REGION 1..35: note = Synthetic Peptide
QASSVPTAQPQAEGSLAKATTAPATTRNTGRGGEE

SEQ ID NO: 939 - protein, 35 aa, synthetic construct
  REGION 1..35: note = Synthetic Peptide
AQASSVPTAQPQAEGSLAKATTAPATTRNTGRGGE

SEQ ID NO: 940 - protein, 35 aa, synthetic construct
  REGION 1..35: note = Synthetic Peptide
KAQASSVPTAQPQAEGSLAKATTAPATTRNTGRGG

SEQ ID NO: 941 - protein, 35 aa, synthetic construct
  REGION 1..35: note = Synthetic Peptide
PKAQASSVPTAQPQAEGSLAKATTAPATTRNTGRG

SEQ ID NO: 942 - protein, 35 aa, synthetic construct
  REGION 1..35: note = Synthetic Peptide
SPKAQASSVPTAQPQAEGSLAKATTAPATTRNTGR

SEQ ID NO: 943 - protein, 35 aa, synthetic construct
  REGION 1..35: note = Synthetic Peptide
ESPKAQASSVPTAQPQAEGSLAKATTAPATTRNTG

SEQ ID NO: 944 - protein, 35 aa, synthetic construct
  REGION 1..35: note = Synthetic Peptide
PESPKAQASSVPTAQPQAEGSLAKATTAPATTRNT

SEQ ID NO: 945 - protein, 35 aa, synthetic construct
  REGION 1..35: note = Synthetic Peptide
WPESPKAQASSVPTAQPQAEGSLAKATTAPATTRN

SEQ ID NO: 946 - protein, 35 aa, synthetic construct
  REGION 1..35: note = Synthetic Peptide
RWPESPKAQASSVPTAQPQAEGSLAKATTAPATTR

SEQ ID NO: 947 - protein, 34 aa, synthetic construct
  REGION 1..34: note = Synthetic Peptide
KKKEKEKEEQEERETKTPECPSHTQPLGVYLLTP

SEQ ID NO: 948 - protein, 34 aa, synthetic construct
  REGION 1..34: note = Synthetic Peptide
EKKKEKEKEEQEERETKTPECPSHTQPLGVYLLT

SEQ ID NO: 949 - protein, 34 aa, synthetic construct
  REGION 1..34: note = Synthetic Peptide
EEKKKEKEKEEQEERETKTPECPSHTQPLGVYLL

SEQ ID NO: 950 - protein, 34 aa, synthetic construct
  REGION 1..34: note = Synthetic Peptide
GEEKKKEKEKEEQEERETKTPECPSHTQPLGVYL

SEQ ID NO: 951 - protein, 34 aa, synthetic construct
  REGION 1..34: note = Synthetic Peptide
GGEEKKKEKEKEEQEERETKTPECPSHTQPLGVY

SEQ ID NO: 952 - protein, 34 aa, synthetic construct
  REGION 1..34: note = Synthetic Peptide
RGGEEKKKEKEKEEQEERETKTPECPSHTQPLGV

SEQ ID NO: 953 - protein, 34 aa, synthetic construct
  REGION 1..34: note = Synthetic Peptide
GRGGEEKKKEKEKEEQEERETKTPECPSHTQPLG

SEQ ID NO: 954 - protein, 34 aa, synthetic construct
  REGION 1..34: note = Synthetic Peptide
TGRGGEEKKKEKEKEEQEERETKTPECPSHTQPL

SEQ ID NO: 955 - protein, 34 aa, synthetic construct
  REGION 1..34: note = Synthetic Peptide
NTGRGGEEKKKEKEKEEQEERETKTPECPSHTQP

SEQ ID NO: 956 - protein, 34 aa, synthetic construct
  REGION 1..34: note = Synthetic Peptide
TRNTGRGGEEKKKEKEKEEQEERETKTPECPSHT

SEQ ID NO: 957 - protein, 34 aa, synthetic construct
  REGION 1..34: note = Synthetic Peptide
TTRNTGRGGEEKKKEKEKEEQEERETKTPECPSH

SEQ ID NO: 958 - protein, 34 aa, synthetic construct
  REGION 1..34: note = Synthetic Peptide
ATTRNTGRGGEEKKKEKEKEEQEERETKTPECPS

SEQ ID NO: 959 - protein, 34 aa, synthetic construct
  REGION 1..34: note = Synthetic Peptide
PATTRNTGRGGEEKKKEKEKEEQEERETKTPECP

SEQ ID NO: 960 - protein, 34 aa, synthetic construct
  REGION 1..34: note = Synthetic Peptide
APATTRNTGRGGEEKKKEKEKEEQEERETKTPEC

SEQ ID NO: 961 - protein, 34 aa, synthetic construct
  REGION 1..34: note = Synthetic Peptide
TAPATTRNTGRGGEEKKKEKEKEEQEERETKTPE

SEQ ID NO: 962 - protein, 34 aa, synthetic construct
  REGION 1..34: note = Synthetic Peptide
TTAPATTRNTGRGGEEKKKEKEKEEQEERETKTP

SEQ ID NO: 963 - protein, 34 aa, synthetic construct
  REGION 1..34: note = Synthetic Peptide
ATTAPATTRNTGRGGEEKKKEKEKEEQEERETKT

SEQ ID NO: 964 - protein, 34 aa, synthetic construct
  REGION 1..34: note = Synthetic Peptide
KATTAPATTRNTGRGGEEKKKEKEKEEQEERETK

SEQ ID NO: 965 - protein, 34 aa, synthetic construct
  REGION 1..34: note = Synthetic Peptide
AKATTAPATTRNTGRGGEEKKKEKEKEEQEERET

SEQ ID NO: 966 - protein, 34 aa, synthetic construct
  REGION 1..34: note = Synthetic Peptide
LAKATTAPATTRNTGRGGEEKKKEKEKEEQEERE

SEQ ID NO: 967 - protein, 34 aa, synthetic construct
  REGION 1..34: note = Synthetic Peptide
SLAKATTAPATTRNTGRGGEEKKKEKEKEEQEER

SEQ ID NO: 968 - protein, 34 aa, synthetic construct
  REGION 1..34: note = Synthetic Peptide
GSLAKATTAPATTRNTGRGGEEKKKEKEKEEQEE

SEQ ID NO: 969 - protein, 34 aa, synthetic construct
  REGION 1..34: note = Synthetic Peptide
EGSLAKATTAPATTRNTGRGGEEKKKEKEKEEQE

SEQ ID NO: 970 - protein, 34 aa, synthetic construct
  REGION 1..34: note = Synthetic Peptide
AEGSLAKATTAPATTRNTGRGGEEKKKEKEKEEQ

SEQ ID NO: 971 - protein, 34 aa, synthetic construct
  REGION 1..34: note = Synthetic Peptide
QAEGSLAKATTAPATTRNTGRGGEEKKKEKEKEE

SEQ ID NO: 972 - protein, 34 aa, synthetic construct
  REGION 1..34: note = Synthetic Peptide
PQAEGSLAKATTAPATTRNTGRGGEEKKKEKEKE

SEQ ID NO: 973 - protein, 34 aa, synthetic construct
  REGION 1..34: note = Synthetic Peptide
QPQAEGSLAKATTAPATTRNTGRGGEEKKKEKEK

SEQ ID NO: 974 - protein, 34 aa, synthetic construct
  REGION 1..34: note = Synthetic Peptide
AQPQAEGSLAKATTAPATTRNTGRGGEEKKKEKE

SEQ ID NO: 975 - protein, 34 aa, synthetic construct
  REGION 1..34: note = Synthetic Peptide
TAQPQAEGSLAKATTAPATTRNTGRGGEEKKKEK

SEQ ID NO: 976 - protein, 34 aa, synthetic construct
  REGION 1..34: note = Synthetic Peptide
PTAQPQAEGSLAKATTAPATTRNTGRGGEEKKKE

SEQ ID NO: 977 - protein, 34 aa, synthetic construct
  REGION 1..34: note = Synthetic Peptide
VPTAQPQAEGSLAKATTAPATTRNTGRGGEEKKK

SEQ ID NO: 978 - protein, 34 aa, synthetic construct
  REGION 1..34: note = Synthetic Peptide
SVPTAQPQAEGSLAKATTAPATTRNTGRGGEEKK

SEQ ID NO: 979 - protein, 34 aa, synthetic construct
  REGION 1..34: note = Synthetic Peptide
SSVPTAQPQAEGSLAKATTAPATTRNTGRGGEEK

SEQ ID NO: 980 - protein, 34 aa, synthetic construct
  REGION 1..34: note = Synthetic Peptide
ASSVPTAQPQAEGSLAKATTAPATTRNTGRGGEE

SEQ ID NO: 981 - protein, 34 aa, synthetic construct
  REGION 1..34: note = Synthetic Peptide
QASSVPTAQPQAEGSLAKATTAPATTRNTGRGGE

SEQ ID NO: 982 - protein, 34 aa, synthetic construct
  REGION 1..34: note = Synthetic Peptide
AQASSVPTAQPQAEGSLAKATTAPATTRNTGRGG

SEQ ID NO: 983 - protein, 34 aa, synthetic construct
  REGION 1..34: note = Synthetic Peptide
KAQASSVPTAQPQAEGSLAKATTAPATTRNTGRG

SEQ ID NO: 984 - protein, 34 aa, synthetic construct
  REGION 1..34: note = Synthetic Peptide
PKAQASSVPTAQPQAEGSLAKATTAPATTRNTGR

SEQ ID NO: 985 - protein, 34 aa, synthetic construct
  REGION 1..34: note = Synthetic Peptide
SPKAQASSVPTAQPQAEGSLAKATTAPATTRNTG

SEQ ID NO: 986 - protein, 34 aa, synthetic construct
  REGION 1..34: note = Synthetic Peptide
ESPKAQASSVPTAQPQAEGSLAKATTAPATTRNT

SEQ ID NO: 987 - protein, 34 aa, synthetic construct
  REGION 1..34: note = Synthetic Peptide
PESPKAQASSVPTAQPQAEGSLAKATTAPATTRN

SEQ ID NO: 988 - protein, 34 aa, synthetic construct
  REGION 1..34: note = Synthetic Peptide
WPESPKAQASSVPTAQPQAEGSLAKATTAPATTR

SEQ ID NO: 989 - protein, 34 aa, synthetic construct
  REGION 1..34: note = Synthetic Peptide
RWPESPKAQASSVPTAQPQAEGSLAKATTAPATT

SEQ ID NO: 990 - protein, 33 aa, synthetic construct
  REGION 1..33: note = Synthetic Peptide
KKEKEKEEQEERETKTPECPSHTQPLGVYLLTP

SEQ ID NO: 991 - protein, 33 aa, synthetic construct
  REGION 1..33: note = Synthetic Peptide
KKKEKEKEEQEERETKTPECPSHTQPLGVYLLT

SEQ ID NO: 992 - protein, 33 aa, synthetic construct
  REGION 1..33: note = Synthetic Peptide
EKKKEKEKEEQEERETKTPECPSHTQPLGVYLL

SEQ ID NO: 993 - protein, 33 aa, synthetic construct
  REGION 1..33: note = Synthetic Peptide
EEKKKEKEKEEQEERETKTPECPSHTQPLGVYL

SEQ ID NO: 994 - protein, 33 aa, synthetic construct
  REGION 1..33: note = Synthetic Peptide
GEEKKKEKEKEEQEERETKTPECPSHTQPLGVY

SEQ ID NO: 995 - protein, 33 aa, synthetic construct
  REGION 1..33: note = Synthetic Peptide
GGEEKKKEKEKEEQEERETKTPECPSHTQPLGV

SEQ ID NO: 996 - protein, 33 aa, synthetic construct
  REGION 1..33: note = Synthetic Peptide
RGGEEKKKEKEKEEQEERETKTPECPSHTQPLG

SEQ ID NO: 997 - protein, 33 aa, synthetic construct
  REGION 1..33: note = Synthetic Peptide
GRGGEEKKKEKEKEEQEERETKTPECPSHTQPL

SEQ ID NO: 998 - protein, 33 aa, synthetic construct
  REGION 1..33: note = Synthetic Peptide
TGRGGEEKKKEKEKEEQEERETKTPECPSHTQP

SEQ ID NO: 999 - protein, 33 aa, synthetic construct
  REGION 1..33: note = Synthetic Peptide
NTGRGGEEKKKEKEKEEQEERETKTPECPSHTQ

SEQ ID NO: 1000 - protein, 33 aa, synthetic construct
  REGION 1..33: note = Synthetic Peptide
RNTGRGGEEKKKEKEKEEQEERETKTPECPSHT

SEQ ID NO: 1001 - protein, 33 aa, synthetic construct
  REGION 1..33: note = Synthetic Peptide
TRNTGRGGEEKKKEKEKEEQEERETKTPECPSH

SEQ ID NO: 1002 - protein, 33 aa, synthetic construct
  REGION 1..33: note = Synthetic Peptide
TTRNTGRGGEEKKKEKEKEEQEERETKTPECPS

SEQ ID NO: 1003 - protein, 33 aa, synthetic construct
  REGION 1..33: note = Synthetic Peptide
ATTRNTGRGGEEKKKEKEKEEQEERETKTPECP

SEQ ID NO: 1004 - protein, 33 aa, synthetic construct
  REGION 1..33: note = Synthetic Peptide
PATTRNTGRGGEEKKKEKEKEEQEERETKTPEC

SEQ ID NO: 1005 - protein, 33 aa, synthetic construct
  REGION 1..33: note = Synthetic Peptide
APATTRNTGRGGEEKKKEKEKEEQEERETKTPE

SEQ ID NO: 1006 - protein, 33 aa, synthetic construct
  REGION 1..33: note = Synthetic Peptide
TAPATTRNTGRGGEEKKKEKEKEEQEERETKTP

SEQ ID NO: 1007 - protein, 33 aa, synthetic construct
  REGION 1..33: note = Synthetic Peptide
TTAPATTRNTGRGGEEKKKEKEKEEQEERETKT

SEQ ID NO: 1008 - protein, 33 aa, synthetic construct
  REGION 1..33: note = Synthetic Peptide
ATTAPATTRNTGRGGEEKKKEKEKEEQEERETK

SEQ ID NO: 1009 - protein, 33 aa, synthetic construct
  REGION 1..33: note = Synthetic Peptide
KATTAPATTRNTGRGGEEKKKEKEKEEQEERET

SEQ ID NO: 1010 - protein, 33 aa, synthetic construct
  REGION 1..33: note = Synthetic Peptide
AKATTAPATTRNTGRGGEEKKKEKEKEEQEERE

SEQ ID NO: 1011 - protein, 33 aa, synthetic construct
  REGION 1..33: note = Synthetic Peptide
LAKATTAPATTRNTGRGGEEKKKEKEKEEQEER

SEQ ID NO: 1012 - protein, 33 aa, synthetic construct
  REGION 1..33: note = Synthetic Peptide
SLAKATTAPATTRNTGRGGEEKKKEKEKEEQEE

SEQ ID NO: 1013 - protein, 33 aa, synthetic construct
  REGION 1..33: note = Synthetic Peptide
GSLAKATTAPATTRNTGRGGEEKKKEKEKEEQE

SEQ ID NO: 1014 - protein, 33 aa, synthetic construct
  REGION 1..33: note = Synthetic Peptide
EGSLAKATTAPATTRNTGRGGEEKKKEKEKEEQ

SEQ ID NO: 1015 - protein, 33 aa, synthetic construct
  REGION 1..33: note = Synthetic Peptide
AEGSLAKATTAPATTRNTGRGGEEKKKEKEKEE

SEQ ID NO: 1016 - protein, 33 aa, synthetic construct
  REGION 1..33: note = Synthetic Peptide
QAEGSLAKATTAPATTRNTGRGGEEKKKEKEKE

SEQ ID NO: 1017 - protein, 33 aa, synthetic construct
  REGION 1..33: note = Synthetic Peptide
PQAEGSLAKATTAPATTRNTGRGGEEKKKEKEK

SEQ ID NO: 1018 - protein, 33 aa, synthetic construct
  REGION 1..33: note = Synthetic Peptide
QPQAEGSLAKATTAPATTRNTGRGGEEKKKEKE

SEQ ID NO: 1019 - protein, 33 aa, synthetic construct
  REGION 1..33: note = Synthetic Peptide
AQPQAEGSLAKATTAPATTRNTGRGGEEKKKEK

SEQ ID NO: 1020 - protein, 33 aa, synthetic construct
  REGION 1..33: note = Synthetic Peptide
TAQPQAEGSLAKATTAPATTRNTGRGGEEKKKE

SEQ ID NO: 1021 - protein, 33 aa, synthetic construct
  REGION 1..33: note = Synthetic Peptide
PTAQPQAEGSLAKATTAPATTRNTGRGGEEKKK

SEQ ID NO: 1022 - protein, 33 aa, synthetic construct
  REGION 1..33: note = Synthetic Peptide
VPTAQPQAEGSLAKATTAPATTRNTGRGGEEKK

SEQ ID NO: 1023 - protein, 33 aa, synthetic construct
  REGION 1..33: note = Synthetic Peptide
SVPTAQPQAEGSLAKATTAPATTRNTGRGGEEK

SEQ ID NO: 1024 - protein, 33 aa, synthetic construct
  REGION 1..33: note = Synthetic Peptide
SSVPTAQPQAEGSLAKATTAPATTRNTGRGGEE

SEQ ID NO: 1025 - protein, 33 aa, synthetic construct
  REGION 1..33: note = Synthetic Peptide
ASSVPTAQPQAEGSLAKATTAPATTRNTGRGGE

SEQ ID NO: 1026 - protein, 33 aa, synthetic construct
  REGION 1..33: note = Synthetic Peptide
QASSVPTAQPQAEGSLAKATTAPATTRNTGRGG

SEQ ID NO: 1027 - protein, 33 aa, synthetic construct
  REGION 1..33: note = Synthetic Peptide
AQASSVPTAQPQAEGSLAKATTAPATTRNTGRG

SEQ ID NO: 1028 - protein, 33 aa, synthetic construct
  REGION 1..33: note = Synthetic Peptide
KAQASSVPTAQPQAEGSLAKATTAPATTRNTGR

SEQ ID NO: 1029 - protein, 33 aa, synthetic construct
  REGION 1..33: note = Synthetic Peptide
PKAQASSVPTAQPQAEGSLAKATTAPATTRNTG

SEQ ID NO: 1030 - protein, 33 aa, synthetic construct
  REGION 1..33: note = Synthetic Peptide
SPKAQASSVPTAQPQAEGSLAKATTAPATTRNT

SEQ ID NO: 1031 - protein, 33 aa, synthetic construct
  REGION 1..33: note = Synthetic Peptide
ESPKAQASSVPTAQPQAEGSLAKATTAPATTRN

SEQ ID NO: 1032 - protein, 33 aa, synthetic construct
  REGION 1..33: note = Synthetic Peptide
PESPKAQASSVPTAQPQAEGSLAKATTAPATTR

SEQ ID NO: 1033 - protein, 33 aa, synthetic construct
  REGION 1..33: note = Synthetic Peptide
WPESPKAQASSVPTAQPQAEGSLAKATTAPATT

SEQ ID NO: 1034 - protein, 33 aa, synthetic construct
  REGION 1..33: note = Synthetic Peptide
RWPESPKAQASSVPTAQPQAEGSLAKATTAPAT

SEQ ID NO: 1035 - protein, 32 aa, synthetic construct
  REGION 1..32: note = Synthetic Peptide
KEKEKEEQEERETKTPECPSHTQPLGVYLLTP

SEQ ID NO: 1036 - protein, 32 aa, synthetic construct
  REGION 1..32: note = Synthetic Peptide
KKEKEKEEQEERETKTPECPSHTQPLGVYLLT

SEQ ID NO: 1037 - protein, 32 aa, synthetic construct
  REGION 1..32: note = Synthetic Peptide
KKKEKEKEEQEERETKTPECPSHTQPLGVYLL

SEQ ID NO: 1038 - protein, 32 aa, synthetic construct
  REGION 1..32: note = Synthetic Peptide
EKKKEKEKEEQEERETKTPECPSHTQPLGVYL

SEQ ID NO: 1039 - protein, 32 aa, synthetic construct
  REGION 1..32: note = Synthetic Peptide
EEKKKEKEKEEQEERETKTPECPSHTQPLGVY

SEQ ID NO: 1040 - protein, 32 aa, synthetic construct
  REGION 1..32: note = Synthetic Peptide
GEEKKKEKEKEEQEERETKTPECPSHTQPLGV

SEQ ID NO: 1041 - protein, 32 aa, synthetic construct
  REGION 1..32: note = Synthetic Peptide
GGEEKKKEKEKEEQEERETKTPECPSHTQPLG

SEQ ID NO: 1042 - protein, 32 aa, synthetic construct
  REGION 1..32: note = Synthetic Peptide
RGGEEKKKEKEKEEQEERETKTPECPSHTQPL

SEQ ID NO: 1043 - protein, 32 aa, synthetic construct
  REGION 1..32: note = Synthetic Peptide
GRGGEEKKKEKEKEEQEERETKTPECPSHTQP

SEQ ID NO: 1044 - protein, 32 aa, synthetic construct
  REGION 1..32: note = Synthetic Peptide
TGRGGEEKKKEKEKEEQEERETKTPECPSHTQ

SEQ ID NO: 1045 - protein, 32 aa, synthetic construct
  REGION 1..32: note = Synthetic Peptide
NTGRGGEEKKKEKEKEEQEERETKTPECPSHT

SEQ ID NO: 1046 - protein, 32 aa, synthetic construct
  REGION 1..32: note = Synthetic Peptide
RNTGRGGEEKKKEKEKEEQEERETKTPECPSH

SEQ ID NO: 1047 - protein, 32 aa, synthetic construct
  REGION 1..32: note = Synthetic Peptide
TRNTGRGGEEKKKEKEKEEQEERETKTPECPS

SEQ ID NO: 1048 - protein, 32 aa, synthetic construct
  REGION 1..32: note = Synthetic Peptide
TTRNTGRGGEEKKKEKEKEEQEERETKTPECP

SEQ ID NO: 1049 - protein, 32 aa, synthetic construct
  REGION 1..32: note = Synthetic Peptide
ATTRNTGRGGEEKKKEKEKEEQEERETKTPEC

SEQ ID NO: 1050 - protein, 32 aa, synthetic construct
  REGION 1..32: note = Synthetic Peptide
PATTRNTGRGGEEKKKEKEKEEQEERETKTPE

SEQ ID NO: 1051 - protein, 32 aa, synthetic construct
  REGION 1..32: note = Synthetic Peptide
APATTRNTGRGGEEKKKEKEKEEQEERETKTP

SEQ ID NO: 1052 - protein, 32 aa, synthetic construct
  REGION 1..32: note = Synthetic Peptide
TAPATTRNTGRGGEEKKKEKEKEEQEERETKT

SEQ ID NO: 1053 - protein, 32 aa, synthetic construct
  REGION 1..32: note = Synthetic Peptide
TTAPATTRNTGRGGEEKKKEKEKEEQEERETK

SEQ ID NO: 1054 - protein, 32 aa, synthetic construct
  REGION 1..32: note = Synthetic Peptide
ATTAPATTRNTGRGGEEKKKEKEKEEQEERET

SEQ ID NO: 1055 - protein, 32 aa, synthetic construct
  REGION 1..32: note = Synthetic Peptide
KATTAPATTRNTGRGGEEKKKEKEKEEQEERE

SEQ ID NO: 1056 - protein, 32 aa, synthetic construct
  REGION 1..32: note = Synthetic Peptide
AKATTAPATTRNTGRGGEEKKKEKEKEEQEER

SEQ ID NO: 1057 - protein, 32 aa, synthetic construct
  REGION 1..32: note = Synthetic Peptide
LAKATTAPATTRNTGRGGEEKKKEKEKEEQEE

SEQ ID NO: 1058 - protein, 32 aa, synthetic construct
  REGION 1..32: note = Synthetic Peptide
SLAKATTAPATTRNTGRGGEEKKKEKEKEEQE

SEQ ID NO: 1059 - protein, 32 aa, synthetic construct
  REGION 1..32: note = Synthetic Peptide
GSLAKATTAPATTRNTGRGGEEKKKEKEKEEQ

SEQ ID NO: 1060 - protein, 32 aa, synthetic construct
  REGION 1..32: note = Synthetic Peptide
EGSLAKATTAPATTRNTGRGGEEKKKEKEKEE

SEQ ID NO: 1061 - protein, 32 aa, synthetic construct
  REGION 1..32: note = Synthetic Peptide
AEGSLAKATTAPATTRNTGRGGEEKKKEKEKE

SEQ ID NO: 1062 - protein, 32 aa, synthetic construct
  REGION 1..32: note = Synthetic Peptide
QAEGSLAKATTAPATTRNTGRGGEEKKKEKEK

SEQ ID NO: 1063 - protein, 32 aa, synthetic construct
  REGION 1..32: note = Synthetic Peptide
PQAEGSLAKATTAPATTRNTGRGGEEKKKEKE

SEQ ID NO: 1064 - protein, 32 aa, synthetic construct
  REGION 1..32: note = Synthetic Peptide
QPQAEGSLAKATTAPATTRNTGRGGEEKKKEK

SEQ ID NO: 1065 - protein, 32 aa, synthetic construct
  REGION 1..32: note = Synthetic Peptide
AQPQAEGSLAKATTAPATTRNTGRGGEEKKKE

SEQ ID NO: 1066 - protein, 32 aa, synthetic construct
  REGION 1..32: note = Synthetic Peptide
TAQPQAEGSLAKATTAPATTRNTGRGGEEKKK

SEQ ID NO: 1067 - protein, 32 aa, synthetic construct
  REGION 1..32: note = Synthetic Peptide
PTAQPQAEGSLAKATTAPATTRNTGRGGEEKK

SEQ ID NO: 1068 - protein, 32 aa, synthetic construct
  REGION 1..32: note = Synthetic Peptide
VPTAQPQAEGSLAKATTAPATTRNTGRGGEEK

SEQ ID NO: 1069 - protein, 32 aa, synthetic construct
  REGION 1..32: note = Synthetic Peptide
SVPTAQPQAEGSLAKATTAPATTRNTGRGGEE

SEQ ID NO: 1070 - protein, 32 aa, synthetic construct
  REGION 1..32: note = Synthetic Peptide
SSVPTAQPQAEGSLAKATTAPATTRNTGRGGE

SEQ ID NO: 1071 - protein, 32 aa, synthetic construct
  REGION 1..32: note = Synthetic Peptide
ASSVPTAQPQAEGSLAKATTAPATTRNTGRGG

SEQ ID NO: 1072 - protein, 32 aa, synthetic construct
  REGION 1..32: note = Synthetic Peptide
QASSVPTAQPQAEGSLAKATTAPATTRNTGRG

SEQ ID NO: 1073 - protein, 32 aa, synthetic construct
  REGION 1..32: note = Synthetic Peptide
AQASSVPTAQPQAEGSLAKATTAPATTRNTGR

SEQ ID NO: 1074 - protein, 32 aa, synthetic construct
  REGION 1..32: note = Synthetic Peptide
KAQASSVPTAQPQAEGSLAKATTAPATTRNTG

SEQ ID NO: 1075 - protein, 32 aa, synthetic construct
  REGION 1..32: note = Synthetic Peptide
PKAQASSVPTAQPQAEGSLAKATTAPATTRNT

SEQ ID NO: 1076 - protein, 32 aa, synthetic construct
  REGION 1..32: note = Synthetic Peptide
SPKAQASSVPTAQPQAEGSLAKATTAPATTRN

SEQ ID NO: 1077 - protein, 32 aa, synthetic construct
  REGION 1..32: note = Synthetic Peptide
ESPKAQASSVPTAQPQAEGSLAKATTAPATTR

SEQ ID NO: 1078 - protein, 32 aa, synthetic construct
  REGION 1..32: note = Synthetic Peptide
PESPKAQASSVPTAQPQAEGSLAKATTAPATT

SEQ ID NO: 1079 - protein, 32 aa, synthetic construct
  REGION 1..32: note = Synthetic Peptide
WPESPKAQASSVPTAQPQAEGSLAKATTAPAT

SEQ ID NO: 1080 - protein, 32 aa, synthetic construct
  REGION 1..32: note = Synthetic Peptide
RWPESPKAQASSVPTAQPQAEGSLAKATTAPA

SEQ ID NO: 1081 - protein, 31 aa, synthetic construct
  REGION 1..31: note = Synthetic Peptide
EKEKEEQEERETKTPECPSHTQPLGVYLLTP

SEQ ID NO: 1082 - protein, 31 aa, synthetic construct
  REGION 1..31: note = Synthetic Peptide
KEKEKEEQEERETKTPECPSHTQPLGVYLLT

SEQ ID NO: 1083 - protein, 31 aa, synthetic construct
  REGION 1..31: note = Synthetic Peptide
KKEKEKEEQEERETKTPECPSHTQPLGVYLL

SEQ ID NO: 1084 - protein, 31 aa, synthetic construct
  REGION 1..31: note = Synthetic Peptide
KKKEKEKEEQEERETKTPECPSHTQPLGVYL

SEQ ID NO: 1085 - protein, 31 aa, synthetic construct
  REGION 1..31: note = Synthetic Peptide
EKKKEKEKEEQEERETKTPECPSHTQPLGVY

SEQ ID NO: 1086 - protein, 31 aa, synthetic construct
  REGION 1..31: note = Synthetic Peptide
EEKKKEKEKEEQEERETKTPECPSHTQPLGV

SEQ ID NO: 1087 - protein, 31 aa, synthetic construct
  REGION 1..31: note = Synthetic Peptide
GEEKKKEKEKEEQEERETKTPECPSHTQPLG

SEQ ID NO: 1088 - protein, 31 aa, synthetic construct
  REGION 1..31: note = Synthetic Peptide
GGEEKKKEKEKEEQEERETKTPECPSHTQPL

SEQ ID NO: 1089 - protein, 31 aa, synthetic construct
  REGION 1..31: note = Synthetic Peptide
RGGEEKKKEKEKEEQEERETKTPECPSHTQP

SEQ ID NO: 1090 - protein, 31 aa, synthetic construct
  REGION 1..31: note = Synthetic Peptide
GRGGEEKKKEKEKEEQEERETKTPECPSHTQ

SEQ ID NO: 1091 - protein, 31 aa, synthetic construct
  REGION 1..31: note = Synthetic Peptide
TGRGGEEKKKEKEKEEQEERETKTPECPSHT

SEQ ID NO: 1092 - protein, 31 aa, synthetic construct
  REGION 1..31: note = Synthetic Peptide
NTGRGGEEKKKEKEKEEQEERETKTPECPSH

SEQ ID NO: 1093 - protein, 31 aa, synthetic construct
  REGION 1..31: note = Synthetic Peptide
RNTGRGGEEKKKEKEKEEQEERETKTPECPS

SEQ ID NO: 1094 - protein, 31 aa, synthetic construct
  REGION 1..31: note = Synthetic Peptide
TRNTGRGGEEKKKEKEKEEQEERETKTPECP

SEQ ID NO: 1095 - protein, 31 aa, synthetic construct
  REGION 1..31: note = Synthetic Peptide
TTRNTGRGGEEKKKEKEKEEQEERETKTPEC

SEQ ID NO: 1096 - protein, 31 aa, synthetic construct
  REGION 1..31: note = Synthetic Peptide
ATTRNTGRGGEEKKKEKEKEEQEERETKTPE

SEQ ID NO: 1097 - protein, 31 aa, synthetic construct
  REGION 1..31: note = Synthetic Peptide
PATTRNTGRGGEEKKKEKEKEEQEERETKTP

SEQ ID NO: 1098 - protein, 31 aa, synthetic construct
  REGION 1..31: note = Synthetic Peptide
APATTRNTGRGGEEKKKEKEKEEQEERETKT

SEQ ID NO: 1099 - protein, 31 aa, synthetic construct
  REGION 1..31: note = Synthetic Peptide
TAPATTRNTGRGGEEKKKEKEKEEQEERETK

SEQ ID NO: 1100 - protein, 31 aa, synthetic construct
  REGION 1..31: note = Synthetic Peptide
TTAPATTRNTGRGGEEKKKEKEKEEQEERET

SEQ ID NO: 1101 - protein, 31 aa, synthetic construct
  REGION 1..31: note = Synthetic Peptide
ATTAPATTRNTGRGGEEKKKEKEKEEQEERE

SEQ ID NO: 1102 - protein, 31 aa, synthetic construct
  REGION 1..31: note = Synthetic Peptide
KATTAPATTRNTGRGGEEKKKEKEKEEQEER

SEQ ID NO: 1103 - protein, 31 aa, synthetic construct
  REGION 1..31: note = Synthetic Peptide
AKATTAPATTRNTGRGGEEKKKEKEKEEQEE

SEQ ID NO: 1104 - protein, 31 aa, synthetic construct
  REGION 1..31: note = Synthetic Peptide
LAKATTAPATTRNTGRGGEEKKKEKEKEEQE

SEQ ID NO: 1105 - protein, 31 aa, synthetic construct
  REGION 1..31: note = Synthetic Peptide
SLAKATTAPATTRNTGRGGEEKKKEKEKEEQ

SEQ ID NO: 1106 - protein, 31 aa, synthetic construct
  REGION 1..31: note = Synthetic Peptide
GSLAKATTAPATTRNTGRGGEEKKKEKEKEE

SEQ ID NO: 1107 - protein, 31 aa, synthetic construct
  REGION 1..31: note = Synthetic Peptide
EGSLAKATTAPATTRNTGRGGEEKKKEKEKE

SEQ ID NO: 1108 - protein, 31 aa, synthetic construct
  REGION 1..31: note = Synthetic Peptide
AEGSLAKATTAPATTRNTGRGGEEKKKEKEK

SEQ ID NO: 1109 - protein, 31 aa, synthetic construct
  REGION 1..31: note = Synthetic Peptide
QAEGSLAKATTAPATTRNTGRGGEEKKKEKE

SEQ ID NO: 1110 - protein, 31 aa, synthetic construct
  REGION 1..31: note = Synthetic Peptide
PQAEGSLAKATTAPATTRNTGRGGEEKKKEK

SEQ ID NO: 1111 - protein, 31 aa, synthetic construct
  REGION 1..31: note = Synthetic Peptide
QPQAEGSLAKATTAPATTRNTGRGGEEKKKE

SEQ ID NO: 1112 - protein, 31 aa, synthetic construct
  REGION 1..31: note = Synthetic Peptide
AQPQAEGSLAKATTAPATTRNTGRGGEEKKK

SEQ ID NO: 1113 - protein, 31 aa, synthetic construct
  REGION 1..31: note = Synthetic Peptide
TAQPQAEGSLAKATTAPATTRNTGRGGEEKK

SEQ ID NO: 1114 - protein, 31 aa, synthetic construct
  REGION 1..31: note = Synthetic Peptide
PTAQPQAEGSLAKATTAPATTRNTGRGGEEK

SEQ ID NO: 1115 - protein, 31 aa, synthetic construct
  REGION 1..31: note = Synthetic Peptide
VPTAQPQAEGSLAKATTAPATTRNTGRGGEE

SEQ ID NO: 1116 - protein, 31 aa, synthetic construct
  REGION 1..31: note = Synthetic Peptide
SVPTAQPQAEGSLAKATTAPATTRNTGRGGE

SEQ ID NO: 1117 - protein, 31 aa, synthetic construct
  REGION 1..31: note = Synthetic Peptide
SSVPTAQPQAEGSLAKATTAPATTRNTGRGG

SEQ ID NO: 1118 - protein, 31 aa, synthetic construct
  REGION 1..31: note = Synthetic Peptide
ASSVPTAQPQAEGSLAKATTAPATTRNTGRG

SEQ ID NO: 1119 - protein, 31 aa, synthetic construct
  REGION 1..31: note = Synthetic Peptide
AQASSVPTAQPQAEGSLAKATTAPATTRNTG

SEQ ID NO: 1120 - protein, 31 aa, synthetic construct
  REGION 1..31: note = Synthetic Peptide
KAQASSVPTAQPQAEGSLAKATTAPATTRNT

SEQ ID NO: 1121 - protein, 31 aa, synthetic construct
  REGION 1..31: note = Synthetic Peptide
PKAQASSVPTAQPQAEGSLAKATTAPATTRN

SEQ ID NO: 1122 - protein, 31 aa, synthetic construct
  REGION 1..31: note = Synthetic Peptide
SPKAQASSVPTAQPQAEGSLAKATTAPATTR

SEQ ID NO: 1123 - protein, 31 aa, synthetic construct
  REGION 1..31: note = Synthetic Peptide
ESPKAQASSVPTAQPQAEGSLAKATTAPATT

SEQ ID NO: 1124 - protein, 31 aa, synthetic construct
  REGION 1..31: note = Synthetic Peptide
PESPKAQASSVPTAQPQAEGSLAKATTAPAT

SEQ ID NO: 1125 - protein, 31 aa, synthetic construct
  REGION 1..31: note = Synthetic Peptide
WPESPKAQASSVPTAQPQAEGSLAKATTAPA

SEQ ID NO: 1126 - protein, 31 aa, synthetic construct
  REGION 1..31: note = Synthetic Peptide
RWPESPKAQASSVPTAQPQAEGSLAKATTAP

SEQ ID NO: 1127 - protein, 30 aa, synthetic construct
  REGION 1..30: note = Synthetic Peptide
KEKEEQEERETKTPECPSHTQPLGVYLLTP

SEQ ID NO: 1128 - protein, 30 aa, synthetic construct
  REGION 1..30: note = Synthetic Peptide
EKEKEEQEERETKTPECPSHTQPLGVYLLT

SEQ ID NO: 1129 - protein, 30 aa, synthetic construct
  REGION 1..30: note = Synthetic Peptide
KEKEKEEQEERETKTPECPSHTQPLGVYLL

SEQ ID NO: 1130 - protein, 30 aa, synthetic construct
  REGION 1..30: note = Synthetic Peptide
KKEKEKEEQEERETKTPECPSHTQPLGVYL

SEQ ID NO: 1131 - protein, 30 aa, synthetic construct
  REGION 1..30: note = Synthetic Peptide
KKKEKEKEEQEERETKTPECPSHTQPLGVY

SEQ ID NO: 1132 - protein, 30 aa, synthetic construct
  REGION 1..30: note = Synthetic Peptide
EKKKEKEKEEQEERETKTPECPSHTQPLGV

SEQ ID NO: 1133 - protein, 30 aa, synthetic construct
  REGION 1..30: note = Synthetic Peptide
EEKKKEKEKEEQEERETKTPECPSHTQPLG

SEQ ID NO: 1134 - protein, 30 aa, synthetic construct
  REGION 1..30: note = Synthetic Peptide
GEEKKKEKEKEEQEERETKTPECPSHTQPL

SEQ ID NO: 1135 - protein, 30 aa, synthetic construct
  REGION 1..30: note = Synthetic Peptide
GGEEKKKEKEKEEQEERETKTPECPSHTQP

SEQ ID NO: 1136 - protein, 30 aa, synthetic construct
  REGION 1..30: note = Synthetic Peptide
RGGEEKKKEKEKEEQEERETKTPECPSHTQ

SEQ ID NO: 1137 - protein, 30 aa, synthetic construct
  REGION 1..30: note = Synthetic Peptide
GRGGEEKKKEKEKEEQEERETKTPECPSHT

SEQ ID NO: 1138 - protein, 30 aa, synthetic construct
  REGION 1..30: note = Synthetic Peptide
TGRGGEEKKKEKEKEEQEERETKTPECPSH

SEQ ID NO: 1139 - protein, 30 aa, synthetic construct
  REGION 1..30: note = Synthetic Peptide
NTGRGGEEKKKEKEKEEQEERETKTPECPS

SEQ ID NO: 1140 - protein, 30 aa, synthetic construct
  REGION 1..30: note = Synthetic Peptide
RNTGRGGEEKKKEKEKEEQEERETKTPECP

SEQ ID NO: 1141 - protein, 30 aa, synthetic construct
  REGION 1..30: note = Synthetic Peptide
TRNTGRGGEEKKKEKEKEEQEERETKTPEC

SEQ ID NO: 1142 - protein, 30 aa, synthetic construct
  REGION 1..30: note = Synthetic Peptide
TTRNTGRGGEEKKKEKEKEEQEERETKTPE

SEQ ID NO: 1143 - protein, 30 aa, synthetic construct
  REGION 1..30: note = Synthetic Peptide
ATTRNTGRGGEEKKKEKEKEEQEERETKTP

SEQ ID NO: 1144 - protein, 30 aa, synthetic construct
  REGION 1..30: note = Synthetic Peptide
PATTRNTGRGGEEKKKEKEKEEQEERETKT

SEQ ID NO: 1145 - protein, 30 aa, synthetic construct
  REGION 1..30: note = Synthetic Peptide
APATTRNTGRGGEEKKKEKEKEEQEERETK

SEQ ID NO: 1146 - protein, 30 aa, synthetic construct
  REGION 1..30: note = Synthetic Peptide
TAPATTRNTGRGGEEKKKEKEKEEQEERET

SEQ ID NO: 1147 - protein, 30 aa, synthetic construct
  REGION 1..30: note = Synthetic Peptide
TTAPATTRNTGRGGEEKKKEKEKEEQEERE

SEQ ID NO: 1148 - protein, 30 aa, synthetic construct
  REGION 1..30: note = Synthetic Peptide
ATTAPATTRNTGRGGEEKKKEKEKEEQEER

SEQ ID NO: 1149 - protein, 30 aa, synthetic construct
  REGION 1..30: note = Synthetic Peptide
KATTAPATTRNTGRGGEEKKKEKEKEEQEE

SEQ ID NO: 1150 - protein, 30 aa, synthetic construct
  REGION 1..30: note = Synthetic Peptide
AKATTAPATTRNTGRGGEEKKKEKEKEEQE

SEQ ID NO: 1151 - protein, 30 aa, synthetic construct
  REGION 1..30: note = Synthetic Peptide
LAKATTAPATTRNTGRGGEEKKKEKEKEEQ

SEQ ID NO: 1152 - protein, 30 aa, synthetic construct
  REGION 1..30: note = Synthetic Peptide
SLAKATTAPATTRNTGRGGEEKKKEKEKEE

SEQ ID NO: 1153 - protein, 30 aa, synthetic construct
  REGION 1..30: note = Synthetic Peptide
GSLAKATTAPATTRNTGRGGEEKKKEKEKE

SEQ ID NO: 1154 - protein, 30 aa, synthetic construct
  REGION 1..30: note = Synthetic Peptide
EGSLAKATTAPATTRNTGRGGEEKKKEKEK

SEQ ID NO: 1155 - protein, 30 aa, synthetic construct
  REGION 1..30: note = Synthetic Peptide
AEGSLAKATTAPATTRNTGRGGEEKKKEKE

SEQ ID NO: 1156 - protein, 30 aa, synthetic construct
  REGION 1..30: note = Synthetic Peptide
QAEGSLAKATTAPATTRNTGRGGEEKKKEK

SEQ ID NO: 1157 - protein, 30 aa, synthetic construct
  REGION 1..30: note = Synthetic Peptide
PQAEGSLAKATTAPATTRNTGRGGEEKKKE

SEQ ID NO: 1158 - protein, 30 aa, synthetic construct
  REGION 1..30: note = Synthetic Peptide
QPQAEGSLAKATTAPATTRNTGRGGEEKKK

SEQ ID NO: 1159 - protein, 30 aa, synthetic construct
  REGION 1..30: note = Synthetic Peptide
AQPQAEGSLAKATTAPATTRNTGRGGEEKK

SEQ ID NO: 1160 - protein, 30 aa, synthetic construct
  REGION 1..30: note = Synthetic Peptide
TAQPQAEGSLAKATTAPATTRNTGRGGEEK

SEQ ID NO: 1161 - protein, 30 aa, synthetic construct
  REGION 1..30: note = Synthetic Peptide
PTAQPQAEGSLAKATTAPATTRNTGRGGEE

SEQ ID NO: 1162 - protein, 30 aa, synthetic construct
  REGION 1..30: note = Synthetic Peptide
VPTAQPQAEGSLAKATTAPATTRNTGRGGE

SEQ ID NO: 1163 - protein, 30 aa, synthetic construct
  REGION 1..30: note = Synthetic Peptide
SVPTAQPQAEGSLAKATTAPATTRNTGRGG

SEQ ID NO: 1164 - protein, 30 aa, synthetic construct
  REGION 1..30: note = Synthetic Peptide
SSVPTAQPQAEGSLAKATTAPATTRNTGRG

SEQ ID NO: 1165 - protein, 30 aa, synthetic construct
  REGION 1..30: note = Synthetic Peptide
ASSVPTAQPQAEGSLAKATTAPATTRNTGR

SEQ ID NO: 1166 - protein, 30 aa, synthetic construct
  REGION 1..30: note = Synthetic Peptide
QASSVPTAQPQAEGSLAKATTAPATTRNTG

SEQ ID NO: 1167 - protein, 30 aa, synthetic construct
  REGION 1..30: note = Synthetic Peptide
AQASSVPTAQPQAEGSLAKATTAPATTRNT

SEQ ID NO: 1168 - protein, 30 aa, synthetic construct
  REGION 1..30: note = Synthetic Peptide
KAQASSVPTAQPQAEGSLAKATTAPATTRN

SEQ ID NO: 1169 - protein, 30 aa, synthetic construct
  REGION 1..30: note = Synthetic Peptide
PKAQASSVPTAQPQAEGSLAKATTAPATTR

SEQ ID NO: 1170 - protein, 30 aa, synthetic construct
  REGION 1..30: note = Synthetic Peptide
SPKAQASSVPTAQPQAEGSLAKATTAPATT

SEQ ID NO: 1171 - protein, 30 aa, synthetic construct
  REGION 1..30: note = Synthetic Peptide
ESPKAQASSVPTAQPQAEGSLAKATTAPAT

SEQ ID NO: 1172 - protein, 30 aa, synthetic construct
  REGION 1..30: note = Synthetic Peptide
PESPKAQASSVPTAQPQAEGSLAKATTAPA

SEQ ID NO: 1173 - protein, 30 aa, synthetic construct
  REGION 1..30: note = Synthetic Peptide
WPESPKAQASSVPTAQPQAEGSLAKATTAP

SEQ ID NO: 1174 - protein, 30 aa, synthetic construct
  REGION 1..30: note = Synthetic Peptide
RWPESPKAQASSVPTAQPQAEGSLAKATTA

SEQ ID NO: 1175 - protein, 29 aa, synthetic construct
  REGION 1..29: note = Synthetic Peptide
EKEEQEERETKTPECPSHTQPLGVYLLTP

SEQ ID NO: 1176 - protein, 29 aa, synthetic construct
  REGION 1..29: note = Synthetic Peptide
KEKEEQEERETKTPECPSHTQPLGVYLLT

SEQ ID NO: 1177 - protein, 29 aa, synthetic construct
  REGION 1..29: note = Synthetic Peptide
EKEKEEQEERETKTPECPSHTQPLGVYLL

SEQ ID NO: 1178 - protein, 29 aa, synthetic construct
  REGION 1..29: note = Synthetic Peptide
KEKEKEEQEERETKTPECPSHTQPLGVYL

SEQ ID NO: 1179 - protein, 29 aa, synthetic construct
  REGION 1..29: note = Synthetic Peptide
KKEKEKEEQEERETKTPECPSHTQPLGVY

SEQ ID NO: 1180 - protein, 29 aa, synthetic construct
  REGION 1..29: note = Synthetic Peptide
KKKEKEKEEQEERETKTPECPSHTQPLGV

SEQ ID NO: 1181 - protein, 29 aa, synthetic construct
  REGION 1..29: note = Synthetic Peptide
EKKKEKEKEEQEERETKTPECPSHTQPLG

SEQ ID NO: 1182 - protein, 29 aa, synthetic construct
  REGION 1..29: note = Synthetic Peptide
EEKKKEKEKEEQEERETKTPECPSHTQPL

SEQ ID NO: 1183 - protein, 29 aa, synthetic construct
  REGION 1..29: note = Synthetic Peptide
GEEKKKEKEKEEQEERETKTPECPSHTQP

SEQ ID NO: 1184 - protein, 29 aa, synthetic construct
  REGION 1..29: note = Synthetic Peptide
GGEEKKKEKEKEEQEERETKTPECPSHTQ

SEQ ID NO: 1185 - protein, 29 aa, synthetic construct
  REGION 1..29: note = Synthetic Peptide
RGGEEKKKEKEKEEQEERETKTPECPSHT

SEQ ID NO: 1186 - protein, 29 aa, synthetic construct
  REGION 1..29: note = Synthetic Peptide
GRGGEEKKKEKEKEEQEERETKTPECPSH

SEQ ID NO: 1187 - protein, 29 aa, synthetic construct
  REGION 1..29: note = Synthetic Peptide
TGRGGEEKKKEKEKEEQEERETKTPECPS

SEQ ID NO: 1188 - protein, 29 aa, synthetic construct
  REGION 1..29: note = Synthetic Peptide
NTGRGGEEKKKEKEKEEQEERETKTPECP

SEQ ID NO: 1189 - protein, 29 aa, synthetic construct
  REGION 1..29: note = Synthetic Peptide
RNTGRGGEEKKKEKEKEEQEERETKTPEC

SEQ ID NO: 1190 - protein, 29 aa, synthetic construct
  REGION 1..29: note = Synthetic Peptide
TRNTGRGGEEKKKEKEKEEQEERETKTPE

SEQ ID NO: 1191 - protein, 29 aa, synthetic construct
  REGION 1..29: note = Synthetic Peptide
TTRNTGRGGEEKKKEKEKEEQEERETKTP

SEQ ID NO: 1192 - protein, 29 aa, synthetic construct
  REGION 1..29: note = Synthetic Peptide
ATTRNTGRGGEEKKKEKEKEEQEERETKT

SEQ ID NO: 1193 - protein, 29 aa, synthetic construct
  REGION 1..29: note = Synthetic Peptide
PATTRNTGRGGEEKKKEKEKEEQEERETK

SEQ ID NO: 1194 - protein, 29 aa, synthetic construct
  REGION 1..29: note = Synthetic Peptide
APATTRNTGRGGEEKKKEKEKEEQEERET

SEQ ID NO: 1195 - protein, 29 aa, synthetic construct
  REGION 1..29: note = Synthetic Peptide
TAPATTRNTGRGGEEKKKEKEKEEQEERE

SEQ ID NO: 1196 - protein, 29 aa, synthetic construct
  REGION 1..29: note = Synthetic Peptide
TTAPATTRNTGRGGEEKKKEKEKEEQEER

SEQ ID NO: 1197 - protein, 29 aa, synthetic construct
  REGION 1..29: note = Synthetic Peptide
ATTAPATTRNTGRGGEEKKKEKEKEEQEE

SEQ ID NO: 1198 - protein, 29 aa, synthetic construct
  REGION 1..29: note = Synthetic Peptide
KATTAPATTRNTGRGGEEKKKEKEKEEQE

SEQ ID NO: 1199 - protein, 29 aa, synthetic construct
  REGION 1..29: note = Synthetic Peptide
AKATTAPATTRNTGRGGEEKKKEKEKEEQ

SEQ ID NO: 1200 - protein, 29 aa, synthetic construct
  REGION 1..29: note = Synthetic Peptide
LAKATTAPATTRNTGRGGEEKKKEKEKEE

SEQ ID NO: 1201 - protein, 29 aa, synthetic construct
  REGION 1..29: note = Synthetic Peptide
SLAKATTAPATTRNTGRGGEEKKKEKEKE

SEQ ID NO: 1202 - protein, 29 aa, synthetic construct
  REGION 1..29: note = Synthetic Peptide
GSLAKATTAPATTRNTGRGGEEKKKEKEK

SEQ ID NO: 1203 - protein, 29 aa, synthetic construct
  REGION 1..29: note = Synthetic Peptide
EGSLAKATTAPATTRNTGRGGEEKKKEKE

SEQ ID NO: 1204 - protein, 29 aa, synthetic construct
  REGION 1..29: note = Synthetic Peptide
AEGSLAKATTAPATTRNTGRGGEEKKKEK

SEQ ID NO: 1205 - protein, 29 aa, synthetic construct
  REGION 1..29: note = Synthetic Peptide
QAEGSLAKATTAPATTRNTGRGGEEKKKE

SEQ ID NO: 1206 - protein, 29 aa, synthetic construct
  REGION 1..29: note = Synthetic Peptide
PQAEGSLAKATTAPATTRNTGRGGEEKKK

SEQ ID NO: 1207 - protein, 29 aa, synthetic construct
  REGION 1..29: note = Synthetic Peptide
QPQAEGSLAKATTAPATTRNTGRGGEEKK

SEQ ID NO: 1208 - protein, 29 aa, synthetic construct
  REGION 1..29: note = Synthetic Peptide
AQPQAEGSLAKATTAPATTRNTGRGGEEK

SEQ ID NO: 1209 - protein, 29 aa, synthetic construct
  REGION 1..29: note = Synthetic Peptide
TAQPQAEGSLAKATTAPATTRNTGRGGEE

SEQ ID NO: 1210 - protein, 29 aa, synthetic construct
  REGION 1..29: note = Synthetic Peptide
PTAQPQAEGSLAKATTAPATTRNTGRGGE

SEQ ID NO: 1211 - protein, 29 aa, synthetic construct
  REGION 1..29: note = Synthetic Peptide
VPTAQPQAEGSLAKATTAPATTRNTGRGG

SEQ ID NO: 1212 - protein, 29 aa, synthetic construct
  REGION 1..29: note = Synthetic Peptide
SVPTAQPQAEGSLAKATTAPATTRNTGRG

SEQ ID NO: 1213 - protein, 29 aa, synthetic construct
  REGION 1..29: note = Synthetic Peptide
SSVPTAQPQAEGSLAKATTAPATTRNTGR

SEQ ID NO: 1214 - protein, 29 aa, synthetic construct
  REGION 1..29: note = Synthetic Peptide
ASSVPTAQPQAEGSLAKATTAPATTRNTG

SEQ ID NO: 1215 - protein, 29 aa, synthetic construct
  REGION 1..29: note = Synthetic Peptide
QASSVPTAQPQAEGSLAKATTAPATTRNT

SEQ ID NO: 1216 - protein, 29 aa, synthetic construct
  REGION 1..29: note = Synthetic Peptide
AQASSVPTAQPQAEGSLAKATTAPATTRN

SEQ ID NO: 1217 - protein, 29 aa, synthetic construct
  REGION 1..29: note = Synthetic Peptide
KAQASSVPTAQPQAEGSLAKATTAPATTR

SEQ ID NO: 1218 - protein, 29 aa, synthetic construct
  REGION 1..29: note = Synthetic Peptide
PKAQASSVPTAQPQAEGSLAKATTAPATT

SEQ ID NO: 1219 - protein, 29 aa, synthetic construct
  REGION 1..29: note = Synthetic Peptide
SPKAQASSVPTAQPQAEGSLAKATTAPAT

SEQ ID NO: 1220 - protein, 29 aa, synthetic construct
  REGION 1..29: note = Synthetic Peptide
ESPKAQASSVPTAQPQAEGSLAKATTAPA

SEQ ID NO: 1221 - protein, 29 aa, synthetic construct
  REGION 1..29: note = Synthetic Peptide
PESPKAQASSVPTAQPQAEGSLAKATTAP

SEQ ID NO: 1222 - protein, 29 aa, synthetic construct
  REGION 1..29: note = Synthetic Peptide
WPESPKAQASSVPTAQPQAEGSLAKATTA

SEQ ID NO: 1223 - protein, 29 aa, synthetic construct
  REGION 1..29: note = Synthetic Peptide
RWPESPKAQASSVPTAQPQAEGSLAKATT

SEQ ID NO: 1224 - protein, 28 aa, synthetic construct
  REGION 1..28: note = Synthetic Peptide
KEEQEERETKTPECPSHTQPLGVYLLTP

SEQ ID NO: 1225 - protein, 28 aa, synthetic construct
  REGION 1..28: note = Synthetic Peptide
EKEEQEERETKTPECPSHTQPLGVYLLT

SEQ ID NO: 1226 - protein, 28 aa, synthetic construct
  REGION 1..28: note = Synthetic Peptide
KEKEEQEERETKTPECPSHTQPLGVYLL

SEQ ID NO: 1227 - protein, 28 aa, synthetic construct
  REGION 1..28: note = Synthetic Peptide
EKEKEEQEERETKTPECPSHTQPLGVYL

SEQ ID NO: 1228 - protein, 28 aa, synthetic construct
  REGION 1..28: note = Synthetic Peptide
KEKEKEEQEERETKTPECPSHTQPLGVY

SEQ ID NO: 1229 - protein, 28 aa, synthetic construct
  REGION 1..28: note = Synthetic Peptide
KKEKEKEEQEERETKTPECPSHTQPLGV

SEQ ID NO: 1230 - protein, 28 aa, synthetic construct
  REGION 1..28: note = Synthetic Peptide
KKKEKEKEEQEERETKTPECPSHTQPLG

SEQ ID NO: 1231 - protein, 28 aa, synthetic construct
  REGION 1..28: note = Synthetic Peptide
EKKKEKEKEEQEERETKTPECPSHTQPL

SEQ ID NO: 1232 - protein, 28 aa, synthetic construct
  REGION 1..28: note = Synthetic Peptide
EEKKKEKEKEEQEERETKTPECPSHTQP

SEQ ID NO: 1233 - protein, 28 aa, synthetic construct
  REGION 1..28: note = Synthetic Peptide
GEEKKKEKEKEEQEERETKTPECPSHTQ

SEQ ID NO: 1234 - protein, 28 aa, synthetic construct
  REGION 1..28: note = Synthetic Peptide
GGEEKKKEKEKEEQEERETKTPECPSHT

SEQ ID NO: 1235 - protein, 28 aa, synthetic construct
  REGION 1..28: note = Synthetic Peptide
RGGEEKKKEKEKEEQEERETKTPECPSH

SEQ ID NO: 1236 - protein, 28 aa, synthetic construct
  REGION 1..28: note = Synthetic Peptide
GRGGEEKKKEKEKEEQEERETKTPECPS

SEQ ID NO: 1237 - protein, 28 aa, synthetic construct
  REGION 1..28: note = Synthetic Peptide
TGRGGEEKKKEKEKEEQEERETKTPECP

SEQ ID NO: 1238 - protein, 28 aa, synthetic construct
  REGION 1..28: note = Synthetic Peptide
NTGRGGEEKKKEKEKEEQEERETKTPEC

SEQ ID NO: 1239 - protein, 28 aa, synthetic construct
  REGION 1..28: note = Synthetic Peptide
RNTGRGGEEKKKEKEKEEQEERETKTPE

SEQ ID NO: 1240 - protein, 28 aa, synthetic construct
  REGION 1..28: note = Synthetic Peptide
TRNTGRGGEEKKKEKEKEEQEERETKTP

SEQ ID NO: 1241 - protein, 28 aa, synthetic construct
  REGION 1..28: note = Synthetic Peptide
TTRNTGRGGEEKKKEKEKEEQEERETKT

SEQ ID NO: 1242 - protein, 28 aa, synthetic construct
  REGION 1..28: note = Synthetic Peptide
ATTRNTGRGGEEKKKEKEKEEQEERETK

SEQ ID NO: 1243 - protein, 28 aa, synthetic construct
  REGION 1..28: note = Synthetic Peptide
PATTRNTGRGGEEKKKEKEKEEQEERET

SEQ ID NO: 1244 - protein, 28 aa, synthetic construct
  REGION 1..28: note = Synthetic Peptide
APATTRNTGRGGEEKKKEKEKEEQEERE

SEQ ID NO: 1245 - protein, 28 aa, synthetic construct
  REGION 1..28: note = Synthetic Peptide
TAPATTRNTGRGGEEKKKEKEKEEQEER

SEQ ID NO: 1246 - protein, 28 aa, synthetic construct
  REGION 1..28: note = Synthetic Peptide
TTAPATTRNTGRGGEEKKKEKEKEEQEE

SEQ ID NO: 1247 - protein, 28 aa, synthetic construct
  REGION 1..28: note = Synthetic Peptide
ATTAPATTRNTGRGGEEKKKEKEKEEQE

SEQ ID NO: 1248 - protein, 28 aa, synthetic construct
  REGION 1..28: note = Synthetic Peptide
KATTAPATTRNTGRGGEEKKKEKEKEEQ

SEQ ID NO: 1249 - protein, 28 aa, synthetic construct
  REGION 1..28: note = Synthetic Peptide
AKATTAPATTRNTGRGGEEKKKEKEKEE

SEQ ID NO: 1250 - protein, 28 aa, synthetic construct
  REGION 1..28: note = Synthetic Peptide
LAKATTAPATTRNTGRGGEEKKKEKEKE

SEQ ID NO: 1251 - protein, 28 aa, synthetic construct
  REGION 1..28: note = Synthetic Peptide
SLAKATTAPATTRNTGRGGEEKKKEKEK

SEQ ID NO: 1252 - protein, 28 aa, synthetic construct
  REGION 1..28: note = Synthetic Peptide
GSLAKATTAPATTRNTGRGGEEKKKEKE

SEQ ID NO: 1253 - protein, 28 aa, synthetic construct
  REGION 1..28: note = Synthetic Peptide
EGSLAKATTAPATTRNTGRGGEEKKKEK

SEQ ID NO: 1254 - protein, 28 aa, synthetic construct
  REGION 1..28: note = Synthetic Peptide
AEGSLAKATTAPATTRNTGRGGEEKKKE

SEQ ID NO: 1255 - protein, 28 aa, synthetic construct
  REGION 1..28: note = Synthetic Peptide
QAEGSLAKATTAPATTRNTGRGGEEKKK

SEQ ID NO: 1256 - protein, 28 aa, synthetic construct
  REGION 1..28: note = Synthetic Peptide
PQAEGSLAKATTAPATTRNTGRGGEEKK

SEQ ID NO: 1257 - protein, 28 aa, synthetic construct
  REGION 1..28: note = Synthetic Peptide
QPQAEGSLAKATTAPATTRNTGRGGEEK

SEQ ID NO: 1258 - protein, 28 aa, synthetic construct
  REGION 1..28: note = Synthetic Peptide
AQPQAEGSLAKATTAPATTRNTGRGGEE

SEQ ID NO: 1259 - protein, 28 aa, synthetic construct
  REGION 1..28: note = Synthetic Peptide
TAQPQAEGSLAKATTAPATTRNTGRGGE

SEQ ID NO: 1260 - protein, 28 aa, synthetic construct
  REGION 1..28: note = Synthetic Peptide
PTAQPQAEGSLAKATTAPATTRNTGRGG

SEQ ID NO: 1261 - protein, 28 aa, synthetic construct
  REGION 1..28: note = Synthetic Peptide
VPTAQPQAEGSLAKATTAPATTRNTGRG

SEQ ID NO: 1262 - protein, 28 aa, synthetic construct
  REGION 1..28: note = Synthetic Peptide
SVPTAQPQAEGSLAKATTAPATTRNTGR

SEQ ID NO: 1263 - protein, 28 aa, synthetic construct
  REGION 1..28: note = Synthetic Peptide
SSVPTAQPQAEGSLAKATTAPATTRNTG

SEQ ID NO: 1264 - protein, 28 aa, synthetic construct
  REGION 1..28: note = Synthetic Peptide
ASSVPTAQPQAEGSLAKATTAPATTRNT

SEQ ID NO: 1265 - protein, 28 aa, synthetic construct
  REGION 1..28: note = Synthetic Peptide
QASSVPTAQPQAEGSLAKATTAPATTRN

SEQ ID NO: 1266 - protein, 28 aa, synthetic construct
  REGION 1..28: note = Synthetic Peptide
AQASSVPTAQPQAEGSLAKATTAPATTR

SEQ ID NO: 1267 - protein, 28 aa, synthetic construct
  REGION 1..28: note = Synthetic Peptide
KAQASSVPTAQPQAEGSLAKATTAPATT

SEQ ID NO: 1268 - protein, 28 aa, synthetic construct
  REGION 1..28: note = Synthetic Peptide
PKAQASSVPTAQPQAEGSLAKATTAPAT

SEQ ID NO: 1269 - protein, 28 aa, synthetic construct
  REGION 1..28: note = Synthetic Peptide
SPKAQASSVPTAQPQAEGSLAKATTAPA

SEQ ID NO: 1270 - protein, 28 aa, synthetic construct
  REGION 1..28: note = Synthetic Peptide
ESPKAQASSVPTAQPQAEGSLAKATTAP

SEQ ID NO: 1271 - protein, 28 aa, synthetic construct
  REGION 1..28: note = Synthetic Peptide
PESPKAQASSVPTAQPQAEGSLAKATTA

SEQ ID NO: 1272 - protein, 28 aa, synthetic construct
  REGION 1..28: note = Synthetic Peptide
WPESPKAQASSVPTAQPQAEGSLAKATT

SEQ ID NO: 1273 - protein, 28 aa, synthetic construct
  REGION 1..28: note = Synthetic Peptide
RWPESPKAQASSVPTAQPQAEGSLAKAT

SEQ ID NO: 1274 - protein, 27 aa, synthetic construct
  REGION 1..27: note = Synthetic Peptide
EEQEERETKTPECPSHTQPLGVYLLTP

SEQ ID NO: 1275 - protein, 27 aa, synthetic construct
  REGION 1..27: note = Synthetic Peptide
KEEQEERETKTPECPSHTQPLGVYLLT

SEQ ID NO: 1276 - protein, 27 aa, synthetic construct
  REGION 1..27: note = Synthetic Peptide
EKEEQEERETKTPECPSHTQPLGVYLL

SEQ ID NO: 1277 - protein, 27 aa, synthetic construct
  REGION 1..27: note = Synthetic Peptide
KEKEEQEERETKTPECPSHTQPLGVYL

SEQ ID NO: 1278 - protein, 27 aa, synthetic construct
  REGION 1..27: note = Synthetic Peptide
EKEKEEQEERETKTPECPSHTQPLGVY

SEQ ID NO: 1279 - protein, 27 aa, synthetic construct
  REGION 1..27: note = Synthetic Peptide
KEKEKEEQEERETKTPECPSHTQPLGV

SEQ ID NO: 1280 - protein, 27 aa, synthetic construct
  REGION 1..27: note = Synthetic Peptide
KKEKEKEEQEERETKTPECPSHTQPLG

SEQ ID NO: 1281 - protein, 27 aa, synthetic construct
  REGION 1..27: note = Synthetic Peptide
KKKEKEKEEQEERETKTPECPSHTQPL

SEQ ID NO: 1282 - protein, 27 aa, synthetic construct
  REGION 1..27: note = Synthetic Peptide
EKKKEKEKEEQEERETKTPECPSHTQP

SEQ ID NO: 1283 - protein, 27 aa, synthetic construct
  REGION 1..27: note = Synthetic Peptide
EEKKKEKEKEEQEERETKTPECPSHTQ

SEQ ID NO: 1284 - protein, 27 aa, synthetic construct
  REGION 1..27: note = Synthetic Peptide
GEEKKKEKEKEEQEERETKTPECPSHT

SEQ ID NO: 1285 - protein, 27 aa, synthetic construct
  REGION 1..27: note = Synthetic Peptide
GGEEKKKEKEKEEQEERETKTPECPSH

SEQ ID NO: 1286 - protein, 27 aa, synthetic construct
  REGION 1..27: note = Synthetic Peptide
RGGEEKKKEKEKEEQEERETKTPECPS

SEQ ID NO: 1287 - protein, 27 aa, synthetic construct
  REGION 1..27: note = Synthetic Peptide
GRGGEEKKKEKEKEEQEERETKTPECP

SEQ ID NO: 1288 - protein, 27 aa, synthetic construct
  REGION 1..27: note = Synthetic Peptide
TGRGGEEKKKEKEKEEQEERETKTPEC

SEQ ID NO: 1289 - protein, 27 aa, synthetic construct
  REGION 1..27: note = Synthetic Peptide
NTGRGGEEKKKEKEKEEQEERETKTPE

SEQ ID NO: 1290 - protein, 27 aa, synthetic construct
  REGION 1..27: note = Synthetic Peptide
RNTGRGGEEKKKEKEKEEQEERETKTP

SEQ ID NO: 1291 - protein, 27 aa, synthetic construct
  REGION 1..27: note = Synthetic Peptide
TRNTGRGGEEKKKEKEKEEQEERETKT

SEQ ID NO: 1292 - protein, 27 aa, synthetic construct
  REGION 1..27: note = Synthetic Peptide
TTRNTGRGGEEKKKEKEKEEQEERETK

SEQ ID NO: 1293 - protein, 27 aa, synthetic construct
  REGION 1..27: note = Synthetic Peptide
ATTRNTGRGGEEKKKEKEKEEQEERET

SEQ ID NO: 1294 - protein, 27 aa, synthetic construct
  REGION 1..27: note = Synthetic Peptide
PATTRNTGRGGEEKKKEKEKEEQEERE

SEQ ID NO: 1295 - protein, 27 aa, synthetic construct
  REGION 1..27: note = Synthetic Peptide
APATTRNTGRGGEEKKKEKEKEEQEER

SEQ ID NO: 1296 - protein, 27 aa, synthetic construct
  REGION 1..27: note = Synthetic Peptide
TAPATTRNTGRGGEEKKKEKEKEEQEE

SEQ ID NO: 1297 - protein, 27 aa, synthetic construct
  REGION 1..27: note = Synthetic Peptide
TTAPATTRNTGRGGEEKKKEKEKEEQE

SEQ ID NO: 1298 - protein, 27 aa, synthetic construct
  REGION 1..27: note = Synthetic Peptide
ATTAPATTRNTGRGGEEKKKEKEKEEQ

SEQ ID NO: 1299 - protein, 27 aa, synthetic construct
  REGION 1..27: note = Synthetic Peptide
KATTAPATTRNTGRGGEEKKKEKEKEE

SEQ ID NO: 1300 - protein, 27 aa, synthetic construct
  REGION 1..27: note = Synthetic Peptide
AKATTAPATTRNTGRGGEEKKKEKEKE

SEQ ID NO: 1301 - protein, 27 aa, synthetic construct
  REGION 1..27: note = Synthetic Peptide
LAKATTAPATTRNTGRGGEEKKKEKEK

SEQ ID NO: 1302 - protein, 27 aa, synthetic construct
  REGION 1..27: note = Synthetic Peptide
SLAKATTAPATTRNTGRGGEEKKKEKE

SEQ ID NO: 1303 - protein, 27 aa, synthetic construct
  REGION 1..27: note = Synthetic Peptide
GSLAKATTAPATTRNTGRGGEEKKKEK

SEQ ID NO: 1304 - protein, 27 aa, synthetic construct
  REGION 1..27: note = Synthetic Peptide
EGSLAKATTAPATTRNTGRGGEEKKKE

SEQ ID NO: 1305 - protein, 27 aa, synthetic construct
  REGION 1..27: note = Synthetic Peptide
AEGSLAKATTAPATTRNTGRGGEEKKK

SEQ ID NO: 1306 - protein, 27 aa, synthetic construct
  REGION 1..27: note = Synthetic Peptide
QAEGSLAKATTAPATTRNTGRGGEEKK

SEQ ID NO: 1307 - protein, 27 aa, synthetic construct
  REGION 1..27: note = Synthetic Peptide
PQAEGSLAKATTAPATTRNTGRGGEEK

SEQ ID NO: 1308 - protein, 27 aa, synthetic construct
  REGION 1..27: note = Synthetic Peptide
QPQAEGSLAKATTAPATTRNTGRGGEE

SEQ ID NO: 1309 - protein, 27 aa, synthetic construct
  REGION 1..27: note = Synthetic Peptide
AQPQAEGSLAKATTAPATTRNTGRGGE

SEQ ID NO: 1310 - protein, 27 aa, synthetic construct
  REGION 1..27: note = Synthetic Peptide
TAQPQAEGSLAKATTAPATTRNTGRGG

SEQ ID NO: 1311 - protein, 27 aa, synthetic construct
  REGION 1..27: note = Synthetic Peptide
PTAQPQAEGSLAKATTAPATTRNTGRG

SEQ ID NO: 1312 - protein, 27 aa, synthetic construct
  REGION 1..27: note = Synthetic Peptide
VPTAQPQAEGSLAKATTAPATTRNTGR

SEQ ID NO: 1313 - protein, 27 aa, synthetic construct
  REGION 1..27: note = Synthetic Peptide
SVPTAQPQAEGSLAKATTAPATTRNTG

SEQ ID NO: 1314 - protein, 27 aa, synthetic construct
  REGION 1..27: note = Synthetic Peptide
SSVPTAQPQAEGSLAKATTAPATTRNT

SEQ ID NO: 1315 - protein, 27 aa, synthetic construct
  REGION 1..27: note = Synthetic Peptide
ASSVPTAQPQAEGSLAKATTAPATTRN

SEQ ID NO: 1316 - protein, 27 aa, synthetic construct
  REGION 1..27: note = Synthetic Peptide
QASSVPTAQPQAEGSLAKATTAPATTR

SEQ ID NO: 1317 - protein, 27 aa, synthetic construct
  REGION 1..27: note = Synthetic Peptide
AQASSVPTAQPQAEGSLAKATTAPATT

SEQ ID NO: 1318 - protein, 27 aa, synthetic construct
  REGION 1..27: note = Synthetic Peptide
KAQASSVPTAQPQAEGSLAKATTAPAT

SEQ ID NO: 1319 - protein, 27 aa, synthetic construct
  REGION 1..27: note = Synthetic Peptide
PKAQASSVPTAQPQAEGSLAKATTAPA

SEQ ID NO: 1320 - protein, 27 aa, synthetic construct
  REGION 1..27: note = Synthetic Peptide
SPKAQASSVPTAQPQAEGSLAKATTAP

SEQ ID NO: 1321 - protein, 27 aa, synthetic construct
  REGION 1..27: note = Synthetic Peptide
ESPKAQASSVPTAQPQAEGSLAKATTA

SEQ ID NO: 1322 - protein, 27 aa, synthetic construct
  REGION 1..27: note = Synthetic Peptide
PESPKAQASSVPTAQPQAEGSLAKATT

SEQ ID NO: 1323 - protein, 27 aa, synthetic construct
  REGION 1..27: note = Synthetic Peptide
WPESPKAQASSVPTAQPQAEGSLAKAT

SEQ ID NO: 1324 - protein, 27 aa, synthetic construct
  REGION 1..27: note = Synthetic Peptide
RWPESPKAQASSVPTAQPQAEGSLAKA

SEQ ID NO: 1325 - protein, 26 aa, synthetic construct
  REGION 1..26: note = Synthetic Peptide
EQEERETKTPECPSHTQPLGVYLLTP

SEQ ID NO: 1326 - protein, 26 aa, synthetic construct
  REGION 1..26: note = Synthetic Peptide
EEQEERETKTPECPSHTQPLGVYLLT

SEQ ID NO: 1327 - protein, 26 aa, synthetic construct
  REGION 1..26: note = Synthetic Peptide
KEEQEERETKTPECPSHTQPLGVYLL

SEQ ID NO: 1328 - protein, 26 aa, synthetic construct
  REGION 1..26: note = Synthetic Peptide
EKEEQEERETKTPECPSHTQPLGVYL

SEQ ID NO: 1329 - protein, 26 aa, synthetic construct
  REGION 1..26: note = Synthetic Peptide
KEKEEQEERETKTPECPSHTQPLGVY

SEQ ID NO: 1330 - protein, 26 aa, synthetic construct
  REGION 1..26: note = Synthetic Peptide
EKEKEEQEERETKTPECPSHTQPLGV

SEQ ID NO: 1331 - protein, 26 aa, synthetic construct
  REGION 1..26: note = Synthetic Peptide
KEKEKEEQEERETKTPECPSHTQPLG

SEQ ID NO: 1332 - protein, 26 aa, synthetic construct
  REGION 1..26: note = Synthetic Peptide
KKEKEKEEQEERETKTPECPSHTQPL

SEQ ID NO: 1333 - protein, 26 aa, synthetic construct
  REGION 1..26: note = Synthetic Peptide
KKKEKEKEEQEERETKTPECPSHTQP

SEQ ID NO: 1334 - protein, 26 aa, synthetic construct
  REGION 1..26: note = Synthetic Peptide
EKKKEKEKEEQEERETKTPECPSHTQ

SEQ ID NO: 1335 - protein, 26 aa, synthetic construct
  REGION 1..26: note = Synthetic Peptide
EEKKKEKEKEEQEERETKTPECPSHT

SEQ ID NO: 1336 - protein, 26 aa, synthetic construct
  REGION 1..26: note = Synthetic Peptide
GEEKKKEKEKEEQEERETKTPECPSH

SEQ ID NO: 1337 - protein, 26 aa, synthetic construct
  REGION 1..26: note = Synthetic Peptide
GGEEKKKEKEKEEQEERETKTPECPS

SEQ ID NO: 1338 - protein, 26 aa, synthetic construct
  REGION 1..26: note = Synthetic Peptide
RGGEEKKKEKEKEEQEERETKTPECP

SEQ ID NO: 1339 - protein, 26 aa, synthetic construct
  REGION 1..26: note = Synthetic Peptide
GRGGEEKKKEKEKEEQEERETKTPEC

SEQ ID NO: 1340 - protein, 26 aa, synthetic construct
  REGION 1..26: note = Synthetic Peptide
TGRGGEEKKKEKEKEEQEERETKTPE

SEQ ID NO: 1341 - protein, 26 aa, synthetic construct
  REGION 1..26: note = Synthetic Peptide
NTGRGGEEKKKEKEKEEQEERETKTP

SEQ ID NO: 1342 - protein, 26 aa, synthetic construct
  REGION 1..26: note = Synthetic Peptide
RNTGRGGEEKKKEKEKEEQEERETKT

SEQ ID NO: 1343 - protein, 26 aa, synthetic construct
  REGION 1..26: note = Synthetic Peptide
TRNTGRGGEEKKKEKEKEEQEERETK

SEQ ID NO: 1344 - protein, 26 aa, synthetic construct
  REGION 1..26: note = Synthetic Peptide
TTRNTGRGGEEKKKEKEKEEQEERET

SEQ ID NO: 1345 - protein, 26 aa, synthetic construct
  REGION 1..26: note = Synthetic Peptide
ATTRNTGRGGEEKKKEKEKEEQEERE

SEQ ID NO: 1346 - protein, 26 aa, synthetic construct
  REGION 1..26: note = Synthetic Peptide
PATTRNTGRGGEEKKKEKEKEEQEER

SEQ ID NO: 1347 - protein, 26 aa, synthetic construct
  REGION 1..26: note = Synthetic Peptide
APATTRNTGRGGEEKKKEKEKEEQEE

SEQ ID NO: 1348 - protein, 26 aa, synthetic construct
  REGION 1..26: note = Synthetic Peptide
TAPATTRNTGRGGEEKKKEKEKEEQE

SEQ ID NO: 1349 - protein, 26 aa, synthetic construct
  REGION 1..26: note = Synthetic Peptide
TTAPATTRNTGRGGEEKKKEKEKEEQ

SEQ ID NO: 1350 - protein, 26 aa, synthetic construct
  REGION 1..26: note = Synthetic Peptide
ATTAPATTRNTGRGGEEKKKEKEKEE

SEQ ID NO: 1351 - protein, 26 aa, synthetic construct
  REGION 1..26: note = Synthetic Peptide
KATTAPATTRNTGRGGEEKKKEKEKE

SEQ ID NO: 1352 - protein, 26 aa, synthetic construct
  REGION 1..26: note = Synthetic Peptide
AKATTAPATTRNTGRGGEEKKKEKEK

SEQ ID NO: 1353 - protein, 26 aa, synthetic construct
  REGION 1..26: note = Synthetic Peptide
LAKATTAPATTRNTGRGGEEKKKEKE

SEQ ID NO: 1354 - protein, 26 aa, synthetic construct
  REGION 1..26: note = Synthetic Peptide
SLAKATTAPATTRNTGRGGEEKKKEK

SEQ ID NO: 1355 - protein, 26 aa, synthetic construct
  REGION 1..26: note = Synthetic Peptide
GSLAKATTAPATTRNTGRGGEEKKKE

SEQ ID NO: 1356 - protein, 26 aa, synthetic construct
  REGION 1..26: note = Synthetic Peptide
EGSLAKATTAPATTRNTGRGGEEKKK

SEQ ID NO: 1357 - protein, 26 aa, synthetic construct
  REGION 1..26: note = Synthetic Peptide
AEGSLAKATTAPATTRNTGRGGEEKK

SEQ ID NO: 1358 - protein, 26 aa, synthetic construct
  REGION 1..26: note = Synthetic Peptide
QAEGSLAKATTAPATTRNTGRGGEEK

SEQ ID NO: 1359 - protein, 26 aa, synthetic construct
  REGION 1..26: note = Synthetic Peptide
PQAEGSLAKATTAPATTRNTGRGGEE

SEQ ID NO: 1360 - protein, 26 aa, synthetic construct
  REGION 1..26: note = Synthetic Peptide
QPQAEGSLAKATTAPATTRNTGRGGE

SEQ ID NO: 1361 - protein, 26 aa, synthetic construct
  REGION 1..26: note = Synthetic Peptide
AQPQAEGSLAKATTAPATTRNTGRGG

SEQ ID NO: 1362 - protein, 26 aa, synthetic construct
  REGION 1..26: note = Synthetic Peptide
TAQPQAEGSLAKATTAPATTRNTGRG

SEQ ID NO: 1363 - protein, 26 aa, synthetic construct
  REGION 1..26: note = Synthetic Peptide
PTAQPQAEGSLAKATTAPATTRNTGR

SEQ ID NO: 1364 - protein, 26 aa, synthetic construct
  REGION 1..26: note = Synthetic Peptide
VPTAQPQAEGSLAKATTAPATTRNTG

SEQ ID NO: 1365 - protein, 26 aa, synthetic construct
  REGION 1..26: note = Synthetic Peptide
SVPTAQPQAEGSLAKATTAPATTRNT

SEQ ID NO: 1366 - protein, 26 aa, synthetic construct
  REGION 1..26: note = Synthetic Peptide
SSVPTAQPQAEGSLAKATTAPATTRN

SEQ ID NO: 1367 - protein, 26 aa, synthetic construct
  REGION 1..26: note = Synthetic Peptide
ASSVPTAQPQAEGSLAKATTAPATTR

SEQ ID NO: 1368 - protein, 26 aa, synthetic construct
  REGION 1..26: note = Synthetic Peptide
QASSVPTAQPQAEGSLAKATTAPATT

SEQ ID NO: 1369 - protein, 26 aa, synthetic construct
  REGION 1..26: note = Synthetic Peptide
AQASSVPTAQPQAEGSLAKATTAPAT

SEQ ID NO: 1370 - protein, 26 aa, synthetic construct
  REGION 1..26: note = Synthetic Peptide
KAQASSVPTAQPQAEGSLAKATTAPA

SEQ ID NO: 1371 - protein, 26 aa, synthetic construct
  REGION 1..26: note = Synthetic Peptide
PKAQASSVPTAQPQAEGSLAKATTAP

SEQ ID NO: 1372 - protein, 26 aa, synthetic construct
  REGION 1..26: note = Synthetic Peptide
SPKAQASSVPTAQPQAEGSLAKATTA

SEQ ID NO: 1373 - protein, 26 aa, synthetic construct
  REGION 1..26: note = Synthetic Peptide
ESPKAQASSVPTAQPQAEGSLAKATT

SEQ ID NO: 1374 - protein, 26 aa, synthetic construct
  REGION 1..26: note = Synthetic Peptide
PESPKAQASSVPTAQPQAEGSLAKAT

SEQ ID NO: 1375 - protein, 26 aa, synthetic construct
  REGION 1..26: note = Synthetic Peptide
WPESPKAQASSVPTAQPQAEGSLAKA

SEQ ID NO: 1376 - protein, 26 aa, synthetic construct
  REGION 1..26: note = Synthetic Peptide
RWPESPKAQASSVPTAQPQAEGSLAK

SEQ ID NO: 1377 - protein, 25 aa, synthetic construct
  REGION 1..25: note = Synthetic Peptide
QEERETKTPECPSHTQPLGVYLLTP

SEQ ID NO: 1378 - protein, 25 aa, synthetic construct
  REGION 1..25: note = Synthetic Peptide
EQEERETKTPECPSHTQPLGVYLLT

SEQ ID NO: 1379 - protein, 25 aa, synthetic construct
  REGION 1..25: note = Synthetic Peptide
EEQEERETKTPECPSHTQPLGVYLL

SEQ ID NO: 1380 - protein, 25 aa, synthetic construct
  REGION 1..25: note = Synthetic Peptide
KEEQEERETKTPECPSHTQPLGVYL

SEQ ID NO: 1381 - protein, 25 aa, synthetic construct
  REGION 1..25: note = Synthetic Peptide
EKEEQEERETKTPECPSHTQPLGVY

SEQ ID NO: 1382 - protein, 25 aa, synthetic construct
  REGION 1..25: note = Synthetic Peptide
KEKEEQEERETKTPECPSHTQPLGV

SEQ ID NO: 1383 - protein, 25 aa, synthetic construct
  REGION 1..25: note = Synthetic Peptide
EKEKEEQEERETKTPECPSHTQPLG

SEQ ID NO: 1384 - protein, 25 aa, synthetic construct
  REGION 1..25: note = Synthetic Peptide
KEKEKEEQEERETKTPECPSHTQPL

SEQ ID NO: 1385 - protein, 25 aa, synthetic construct
  REGION 1..25: note = Synthetic Peptide
KKEKEKEEQEERETKTPECPSHTQP

SEQ ID NO: 1386 - protein, 25 aa, synthetic construct
  REGION 1..25: note = Synthetic Peptide
KKKEKEKEEQEERETKTPECPSHTQ

SEQ ID NO: 1387 - protein, 25 aa, synthetic construct
  REGION 1..25: note = Synthetic Peptide
EKKKEKEKEEQEERETKTPECPSHT

SEQ ID NO: 1388 - protein, 25 aa, synthetic construct
  REGION 1..25: note = Synthetic Peptide
EEKKKEKEKEEQEERETKTPECPSH

SEQ ID NO: 1389 - protein, 25 aa, synthetic construct
  REGION 1..25: note = Synthetic Peptide
GEEKKKEKEKEEQEERETKTPECPS

SEQ ID NO: 1390 - protein, 25 aa, synthetic construct
  REGION 1..25: note = Synthetic Peptide
GGEEKKKEKEKEEQEERETKTPECP

SEQ ID NO: 1391 - protein, 25 aa, synthetic construct
  REGION 1..25: note = Synthetic Peptide
RGGEEKKKEKEKEEQEERETKTPEC

SEQ ID NO: 1392 - protein, 25 aa, synthetic construct
  REGION 1..25: note = Synthetic Peptide
GRGGEEKKKEKEKEEQEERETKTPE

SEQ ID NO: 1393 - protein, 25 aa, synthetic construct
  REGION 1..25: note = Synthetic Peptide
TGRGGEEKKKEKEKEEQEERETKTP

SEQ ID NO: 1394 - protein, 25 aa, synthetic construct
  REGION 1..25: note = Synthetic Peptide
NTGRGGEEKKKEKEKEEQEERETKT

SEQ ID NO: 1395 - protein, 25 aa, synthetic construct
  REGION 1..25: note = Synthetic Peptide
RNTGRGGEEKKKEKEKEEQEERETK

SEQ ID NO: 1396 - protein, 25 aa, synthetic construct
  REGION 1..25: note = Synthetic Peptide
TRNTGRGGEEKKKEKEKEEQEERET

SEQ ID NO: 1397 - protein, 25 aa, synthetic construct
  REGION 1..25: note = Synthetic Peptide
TTRNTGRGGEEKKKEKEKEEQEERE

SEQ ID NO: 1398 - protein, 25 aa, synthetic construct
  REGION 1..25: note = Synthetic Peptide
ATTRNTGRGGEEKKKEKEKEEQEER

SEQ ID NO: 1399 - protein, 25 aa, synthetic construct
  REGION 1..25: note = Synthetic Peptide
PATTRNTGRGGEEKKKEKEKEEQEE

SEQ ID NO: 1400 - protein, 25 aa, synthetic construct
  REGION 1..25: note = Synthetic Peptide
APATTRNTGRGGEEKKKEKEKEEQE

SEQ ID NO: 1401 - protein, 25 aa, synthetic construct
  REGION 1..25: note = Synthetic Peptide
TAPATTRNTGRGGEEKKKEKEKEEQ

SEQ ID NO: 1402 - protein, 25 aa, synthetic construct
  REGION 1..25: note = Synthetic Peptide
TTAPATTRNTGRGGEEKKKEKEKEE

SEQ ID NO: 1403 - protein, 25 aa, synthetic construct
  REGION 1..25: note = Synthetic Peptide
ATTAPATTRNTGRGGEEKKKEKEKE

SEQ ID NO: 1404 - protein, 25 aa, synthetic construct
  REGION 1..25: note = Synthetic Peptide
KATTAPATTRNTGRGGEEKKKEKEK

SEQ ID NO: 1405 - protein, 25 aa, synthetic construct
  REGION 1..25: note = Synthetic Peptide
AKATTAPATTRNTGRGGEEKKKEKE

SEQ ID NO: 1406 - protein, 25 aa, synthetic construct
  REGION 1..25: note = Synthetic Peptide
LAKATTAPATTRNTGRGGEEKKKEK

SEQ ID NO: 1407 - protein, 25 aa, synthetic construct
  REGION 1..25: note = Synthetic Peptide
SLAKATTAPATTRNTGRGGEEKKKE

SEQ ID NO: 1408 - protein, 25 aa, synthetic construct
  REGION 1..25: note = Synthetic Peptide
GSLAKATTAPATTRNTGRGGEEKKK

SEQ ID NO: 1409 - protein, 25 aa, synthetic construct
  REGION 1..25: note = Synthetic Peptide
EGSLAKATTAPATTRNTGRGGEEKK

SEQ ID NO: 1410 - protein, 25 aa, synthetic construct
  REGION 1..25: note = Synthetic Peptide
AEGSLAKATTAPATTRNTGRGGEEK

SEQ ID NO: 1411 - protein, 25 aa, synthetic construct
  REGION 1..25: note = Synthetic Peptide
QAEGSLAKATTAPATTRNTGRGGEE

SEQ ID NO: 1412 - protein, 25 aa, synthetic construct
  REGION 1..25: note = Synthetic Peptide
PQAEGSLAKATTAPATTRNTGRGGE

SEQ ID NO: 1413 - protein, 25 aa, synthetic construct
  REGION 1..25: note = Synthetic Peptide
QPQAEGSLAKATTAPATTRNTGRGG

SEQ ID NO: 1414 - protein, 25 aa, synthetic construct
  REGION 1..25: note = Synthetic Peptide
AQPQAEGSLAKATTAPATTRNTGRG

SEQ ID NO: 1415 - protein, 25 aa, synthetic construct
  REGION 1..25: note = Synthetic Peptide
TAQPQAEGSLAKATTAPATTRNTGR

SEQ ID NO: 1416 - protein, 25 aa, synthetic construct
  REGION 1..25: note = Synthetic Peptide
PTAQPQAEGSLAKATTAPATTRNTG

SEQ ID NO: 1417 - protein, 25 aa, synthetic construct
  REGION 1..25: note = Synthetic Peptide
VPTAQPQAEGSLAKATTAPATTRNT

SEQ ID NO: 1418 - protein, 25 aa, synthetic construct
  REGION 1..25: note = Synthetic Peptide
SVPTAQPQAEGSLAKATTAPATTRN

SEQ ID NO: 1419 - protein, 25 aa, synthetic construct
  REGION 1..25: note = Synthetic Peptide
SSVPTAQPQAEGSLAKATTAPATTR

SEQ ID NO: 1420 - protein, 25 aa, synthetic construct
  REGION 1..25: note = Synthetic Peptide
ASSVPTAQPQAEGSLAKATTAPATT

SEQ ID NO: 1421 - protein, 25 aa, synthetic construct
  REGION 1..25: note = Synthetic Peptide
QASSVPTAQPQAEGSLAKATTAPAT

SEQ ID NO: 1422 - protein, 25 aa, synthetic construct
  REGION 1..25: note = Synthetic Peptide
AQASSVPTAQPQAEGSLAKATTAPA

SEQ ID NO: 1423 - protein, 25 aa, synthetic construct
  REGION 1..25: note = Synthetic Peptide
KAQASSVPTAQPQAEGSLAKATTAP

SEQ ID NO: 1424 - protein, 25 aa, synthetic construct
  REGION 1..25: note = Synthetic Peptide
PKAQASSVPTAQPQAEGSLAKATTA

SEQ ID NO: 1425 - protein, 25 aa, synthetic construct
  REGION 1..25: note = Synthetic Peptide
SPKAQASSVPTAQPQAEGSLAKATT

SEQ ID NO: 1426 - protein, 25 aa, synthetic construct
  REGION 1..25: note = Synthetic Peptide
ESPKAQASSVPTAQPQAEGSLAKAT

SEQ ID NO: 1427 - protein, 25 aa, synthetic construct
  REGION 1..25: note = Synthetic Peptide
PESPKAQASSVPTAQPQAEGSLAKA

SEQ ID NO: 1428 - protein, 25 aa, synthetic construct
  REGION 1..25: note = Synthetic Peptide
WPESPKAQASSVPTAQPQAEGSLAK

SEQ ID NO: 1429 - protein, 25 aa, synthetic construct
  REGION 1..25: note = Synthetic Peptide
RWPESPKAQASSVPTAQPQAEGSLA

SEQ ID NO: 1430 - protein, 24 aa, synthetic construct
  REGION 1..24: note = Synthetic Peptide
EERETKTPECPSHTQPLGVYLLTP

SEQ ID NO: 1431 - protein, 24 aa, synthetic construct
  REGION 1..24: note = Synthetic Peptide
QEERETKTPECPSHTQPLGVYLLT

SEQ ID NO: 1432 - protein, 24 aa, synthetic construct
  REGION 1..24: note = Synthetic Peptide
EQEERETKTPECPSHTQPLGVYLL

SEQ ID NO: 1433 - protein, 24 aa, synthetic construct
  REGION 1..24: note = Synthetic Peptide
EEQEERETKTPECPSHTQPLGVYL

SEQ ID NO: 1434 - protein, 24 aa, synthetic construct
  REGION 1..24: note = Synthetic Peptide
KEEQEERETKTPECPSHTQPLGVY

SEQ ID NO: 1435 - protein, 24 aa, synthetic construct
  REGION 1..24: note = Synthetic Peptide
EKEEQEERETKTPECPSHTQPLGV

SEQ ID NO: 1436 - protein, 24 aa, synthetic construct
  REGION 1..24: note = Synthetic Peptide
KEKEEQEERETKTPECPSHTQPLG

SEQ ID NO: 1437 - protein, 24 aa, synthetic construct
  REGION 1..24: note = Synthetic Peptide
EKEKEEQEERETKTPECPSHTQPL

SEQ ID NO: 1438 - protein, 24 aa, synthetic construct
  REGION 1..24: note = Synthetic Peptide
KEKEKEEQEERETKTPECPSHTQP

SEQ ID NO: 1439 - protein, 24 aa, synthetic construct
  REGION 1..24: note = Synthetic Peptide
KKEKEKEEQEERETKTPECPSHTQ

SEQ ID NO: 1440 - protein, 24 aa, synthetic construct
  REGION 1..24: note = Synthetic Peptide
KKKEKEKEEQEERETKTPECPSHT

SEQ ID NO: 1441 - protein, 24 aa, synthetic construct
  REGION 1..24: note = Synthetic Peptide
EKKKEKEKEEQEERETKTPECPSH

SEQ ID NO: 1442 - protein, 24 aa, synthetic construct
  REGION 1..24: note = Synthetic Peptide
EEKKKEKEKEEQEERETKTPECPS

SEQ ID NO: 1443 - protein, 24 aa, synthetic construct
  REGION 1..24: note = Synthetic Peptide
GEEKKKEKEKEEQEERETKTPECP

SEQ ID NO: 1444 - protein, 24 aa, synthetic construct
  REGION 1..24: note = Synthetic Peptide
GGEEKKKEKEKEEQEERETKTPEC

SEQ ID NO: 1445 - protein, 24 aa, synthetic construct
  REGION 1..24: note = Synthetic Peptide
RGGEEKKKEKEKEEQEERETKTPE

SEQ ID NO: 1446 - protein, 24 aa, synthetic construct
  REGION 1..24: note = Synthetic Peptide
GRGGEEKKKEKEKEEQEERETKTP

SEQ ID NO: 1447 - protein, 24 aa, synthetic construct
  REGION 1..24: note = Synthetic Peptide
TGRGGEEKKKEKEKEEQEERETKT

SEQ ID NO: 1448 - protein, 24 aa, synthetic construct
  REGION 1..24: note = Synthetic Peptide
NTGRGGEEKKKEKEKEEQEERETK

SEQ ID NO: 1449 - protein, 24 aa, synthetic construct
  REGION 1..24: note = Synthetic Peptide
RNTGRGGEEKKKEKEKEEQEERET

SEQ ID NO: 1450 - protein, 24 aa, synthetic construct
  REGION 1..24: note = Synthetic Peptide
TRNTGRGGEEKKKEKEKEEQEERE

SEQ ID NO: 1451 - protein, 24 aa, synthetic construct
  REGION 1..24: note = Synthetic Peptide
TTRNTGRGGEEKKKEKEKEEQEER

SEQ ID NO: 1452 - protein, 24 aa, synthetic construct
  REGION 1..24: note = Synthetic Peptide
ATTRNTGRGGEEKKKEKEKEEQEE

SEQ ID NO: 1453 - protein, 24 aa, synthetic construct
  REGION 1..24: note = Synthetic Peptide
PATTRNTGRGGEEKKKEKEKEEQE

SEQ ID NO: 1454 - protein, 24 aa, synthetic construct
  REGION 1..24: note = Synthetic Peptide
APATTRNTGRGGEEKKKEKEKEEQ

SEQ ID NO: 1455 - protein, 24 aa, synthetic construct
  REGION 1..24: note = Synthetic Peptide
TAPATTRNTGRGGEEKKKEKEKEE

SEQ ID NO: 1456 - protein, 24 aa, synthetic construct
  REGION 1..24: note = Synthetic Peptide
TTAPATTRNTGRGGEEKKKEKEKE

SEQ ID NO: 1457 - protein, 24 aa, synthetic construct
  REGION 1..24: note = Synthetic Peptide
ATTAPATTRNTGRGGEEKKKEKEK

SEQ ID NO: 1458 - protein, 24 aa, synthetic construct
  REGION 1..24: note = Synthetic Peptide
KATTAPATTRNTGRGGEEKKKEKE

SEQ ID NO: 1459 - protein, 24 aa, synthetic construct
  REGION 1..24: note = Synthetic Peptide
AKATTAPATTRNTGRGGEEKKKEK

SEQ ID NO: 1460 - protein, 24 aa, synthetic construct
  REGION 1..24: note = Synthetic Peptide
LAKATTAPATTRNTGRGGEEKKKE

SEQ ID NO: 1461 - protein, 24 aa, synthetic construct
  REGION 1..24: note = Synthetic Peptide
SLAKATTAPATTRNTGRGGEEKKK

SEQ ID NO: 1462 - protein, 24 aa, synthetic construct
  REGION 1..24: note = Synthetic Peptide
GSLAKATTAPATTRNTGRGGEEKK

SEQ ID NO: 1463 - protein, 24 aa, synthetic construct
  REGION 1..24: note = Synthetic Peptide
EGSLAKATTAPATTRNTGRGGEEK

SEQ ID NO: 1464 - protein, 24 aa, synthetic construct
  REGION 1..24: note = Synthetic Peptide
AEGSLAKATTAPATTRNTGRGGEE

SEQ ID NO: 1465 - protein, 24 aa, synthetic construct
  REGION 1..24: note = Synthetic Peptide
QAEGSLAKATTAPATTRNTGRGGE

SEQ ID NO: 1466 - protein, 24 aa, synthetic construct
  REGION 1..24: note = Synthetic Peptide
PQAEGSLAKATTAPATTRNTGRGG

SEQ ID NO: 1467 - protein, 24 aa, synthetic construct
  REGION 1..24: note = Synthetic Peptide
QPQAEGSLAKATTAPATTRNTGRG

SEQ ID NO: 1468 - protein, 24 aa, synthetic construct
  REGION 1..24: note = Synthetic Peptide
AQPQAEGSLAKATTAPATTRNTGR

SEQ ID NO: 1469 - protein, 24 aa, synthetic construct
  REGION 1..24: note = Synthetic Peptide
TAQPQAEGSLAKATTAPATTRNTG

SEQ ID NO: 1470 - protein, 24 aa, synthetic construct
  REGION 1..24: note = Synthetic Peptide
PTAQPQAEGSLAKATTAPATTRNT

SEQ ID NO: 1471 - protein, 24 aa, synthetic construct
  REGION 1..24: note = Synthetic Peptide
VPTAQPQAEGSLAKATTAPATTRN

SEQ ID NO: 1472 - protein, 24 aa, synthetic construct
  REGION 1..24: note = Synthetic Peptide
SVPTAQPQAEGSLAKATTAPATTR

SEQ ID NO: 1473 - protein, 24 aa, synthetic construct
  REGION 1..24: note = Synthetic Peptide
SSVPTAQPQAEGSLAKATTAPATT

SEQ ID NO: 1474 - protein, 24 aa, synthetic construct
  REGION 1..24: note = Synthetic Peptide
ASSVPTAQPQAEGSLAKATTAPAT

SEQ ID NO: 1475 - protein, 24 aa, synthetic construct
  REGION 1..24: note = Synthetic Peptide
QASSVPTAQPQAEGSLAKATTAPA

SEQ ID NO: 1476 - protein, 24 aa, synthetic construct
  REGION 1..24: note = Synthetic Peptide
AQASSVPTAQPQAEGSLAKATTAP

SEQ ID NO: 1477 - protein, 24 aa, synthetic construct
  REGION 1..24: note = Synthetic Peptide
KAQASSVPTAQPQAEGSLAKATTA

SEQ ID NO: 1478 - protein, 24 aa, synthetic construct
  REGION 1..24: note = Synthetic Peptide
PKAQASSVPTAQPQAEGSLAKATT

SEQ ID NO: 1479 - protein, 24 aa, synthetic construct
  REGION 1..24: note = Synthetic Peptide
SPKAQASSVPTAQPQAEGSLAKAT

SEQ ID NO: 1480 - protein, 24 aa, synthetic construct
  REGION 1..24: note = Synthetic Peptide
ESPKAQASSVPTAQPQAEGSLAKA

SEQ ID NO: 1481 - protein, 24 aa, synthetic construct
  REGION 1..24: note = Synthetic Peptide
PESPKAQASSVPTAQPQAEGSLAK

SEQ ID NO: 1482 - protein, 24 aa, synthetic construct
  REGION 1..24: note = Synthetic Peptide
WPESPKAQASSVPTAQPQAEGSLA

SEQ ID NO: 1483 - protein, 24 aa, synthetic construct
  REGION 1..24: note = Synthetic Peptide
RWPESPKAQASSVPTAQPQAEGSL

SEQ ID NO: 1484 - protein, 23 aa, synthetic construct
  REGION 1..23: note = Synthetic Peptide
ERETKTPECPSHTQPLGVYLLTP

SEQ ID NO: 1485 - protein, 23 aa, synthetic construct
  REGION 1..23: note = Synthetic Peptide
EERETKTPECPSHTQPLGVYLLT

SEQ ID NO: 1486 - protein, 23 aa, synthetic construct
  REGION 1..23: note = Synthetic Peptide
QEERETKTPECPSHTQPLGVYLL

SEQ ID NO: 1487 - protein, 23 aa, synthetic construct
  REGION 1..23: note = Synthetic Peptide
EQEERETKTPECPSHTQPLGVYL

SEQ ID NO: 1488 - protein, 23 aa, synthetic construct
  REGION 1..23: note = Synthetic Peptide
EEQEERETKTPECPSHTQPLGVY

SEQ ID NO: 1489 - protein, 23 aa, synthetic construct
  REGION 1..23: note = Synthetic Peptide
KEEQEERETKTPECPSHTQPLGV

SEQ ID NO: 1490 - protein, 23 aa, synthetic construct
  REGION 1..23: note = Synthetic Peptide
EKEEQEERETKTPECPSHTQPLG

SEQ ID NO: 1491 - protein, 23 aa, synthetic construct
  REGION 1..23: note = Synthetic Peptide
KEKEEQEERETKTPECPSHTQPL

SEQ ID NO: 1492 - protein, 23 aa, synthetic construct
  REGION 1..23: note = Synthetic Peptide
EKEKEEQEERETKTPECPSHTQP

SEQ ID NO: 1493 - protein, 23 aa, synthetic construct
  REGION 1..23: note = Synthetic Peptide
KEKEKEEQEERETKTPECPSHTQ

SEQ ID NO: 1494 - protein, 23 aa, synthetic construct
  REGION 1..23: note = Synthetic Peptide
KKEKEKEEQEERETKTPECPSHT

SEQ ID NO: 1495 - protein, 23 aa, synthetic construct
  REGION 1..23: note = Synthetic Peptide
KKKEKEKEEQEERETKTPECPSH

SEQ ID NO: 1496 - protein, 23 aa, synthetic construct
  REGION 1..23: note = Synthetic Peptide
EKKKEKEKEEQEERETKTPECPS

SEQ ID NO: 1497 - protein, 23 aa, synthetic construct
  REGION 1..23: note = Synthetic Peptide
EEKKKEKEKEEQEERETKTPECP

SEQ ID NO: 1498 - protein, 23 aa, synthetic construct
  REGION 1..23: note = Synthetic Peptide
GEEKKKEKEKEEQEERETKTPEC

SEQ ID NO: 1499 - protein, 23 aa, synthetic construct
  REGION 1..23: note = Synthetic Peptide
GGEEKKKEKEKEEQEERETKTPE

SEQ ID NO: 1500 - protein, 23 aa, synthetic construct
  REGION 1..23: note = Synthetic Peptide
RGGEEKKKEKEKEEQEERETKTP

SEQ ID NO: 1501 - protein, 23 aa, synthetic construct
  REGION 1..23: note = Synthetic Peptide
GRGGEEKKKEKEKEEQEERETKT

SEQ ID NO: 1502 - protein, 23 aa, synthetic construct
  REGION 1..23: note = Synthetic Peptide
TGRGGEEKKKEKEKEEQEERETK

SEQ ID NO: 1503 - protein, 23 aa, synthetic construct
  REGION 1..23: note = Synthetic Peptide
NTGRGGEEKKKEKEKEEQEERET

SEQ ID NO: 1504 - protein, 23 aa, synthetic construct
  REGION 1..23: note = Synthetic Peptide
RNTGRGGEEKKKEKEKEEQEERE

SEQ ID NO: 1505 - protein, 23 aa, synthetic construct
  REGION 1..23: note = Synthetic Peptide
TRNTGRGGEEKKKEKEKEEQEER

SEQ ID NO: 1506 - protein, 23 aa, synthetic construct
  REGION 1..23: note = Synthetic Peptide
TTRNTGRGGEEKKKEKEKEEQEE

SEQ ID NO: 1507 - protein, 23 aa, synthetic construct
  REGION 1..23: note = Synthetic Peptide
ATTRNTGRGGEEKKKEKEKEEQE

SEQ ID NO: 1508 - protein, 23 aa, synthetic construct
  REGION 1..23: note = Synthetic Peptide
PATTRNTGRGGEEKKKEKEKEEQ

SEQ ID NO: 1509 - protein, 23 aa, synthetic construct
  REGION 1..23: note = Synthetic Peptide
APATTRNTGRGGEEKKKEKEKEE

SEQ ID NO: 1510 - protein, 23 aa, synthetic construct
  REGION 1..23: note = Synthetic Peptide
TAPATTRNTGRGGEEKKKEKEKE

SEQ ID NO: 1511 - protein, 23 aa, synthetic construct
  REGION 1..23: note = Synthetic Peptide
TTAPATTRNTGRGGEEKKKEKEK

SEQ ID NO: 1512 - protein, 23 aa, synthetic construct
  REGION 1..23: note = Synthetic Peptide
ATTAPATTRNTGRGGEEKKKEKE

SEQ ID NO: 1513 - protein, 23 aa, synthetic construct
  REGION 1..23: note = Synthetic Peptide
KATTAPATTRNTGRGGEEKKKEK

SEQ ID NO: 1514 - protein, 23 aa, synthetic construct
  REGION 1..23: note = Synthetic Peptide
AKATTAPATTRNTGRGGEEKKKE

SEQ ID NO: 1515 - protein, 23 aa, synthetic construct
  REGION 1..23: note = Synthetic Peptide
LAKATTAPATTRNTGRGGEEKKK

SEQ ID NO: 1516 - protein, 23 aa, synthetic construct
  REGION 1..23: note = Synthetic Peptide
SLAKATTAPATTRNTGRGGEEKK

SEQ ID NO: 1517 - protein, 23 aa, synthetic construct
  REGION 1..23: note = Synthetic Peptide
GSLAKATTAPATTRNTGRGGEEK

SEQ ID NO: 1518 - protein, 23 aa, synthetic construct
  REGION 1..23: note = Synthetic Peptide
EGSLAKATTAPATTRNTGRGGEE

SEQ ID NO: 1519 - protein, 23 aa, synthetic construct
  REGION 1..23: note = Synthetic Peptide
AEGSLAKATTAPATTRNTGRGGE

SEQ ID NO: 1520 - protein, 23 aa, synthetic construct
  REGION 1..23: note = Synthetic Peptide
QAEGSLAKATTAPATTRNTGRGG

SEQ ID NO: 1521 - protein, 23 aa, synthetic construct
  REGION 1..23: note = Synthetic Peptide
PQAEGSLAKATTAPATTRNTGRG

SEQ ID NO: 1522 - protein, 23 aa, synthetic construct
  REGION 1..23: note = Synthetic Peptide
QPQAEGSLAKATTAPATTRNTGR

SEQ ID NO: 1523 - protein, 23 aa, synthetic construct
  REGION 1..23: note = Synthetic Peptide
AQPQAEGSLAKATTAPATTRNTG

SEQ ID NO: 1524 - protein, 23 aa, synthetic construct
  REGION 1..23: note = Synthetic Peptide
TAQPQAEGSLAKATTAPATTRNT

SEQ ID NO: 1525 - protein, 23 aa, synthetic construct
  REGION 1..23: note = Synthetic Peptide
PTAQPQAEGSLAKATTAPATTRN

SEQ ID NO: 1526 - protein, 23 aa, synthetic construct
  REGION 1..23: note = Synthetic Peptide
VPTAQPQAEGSLAKATTAPATTR

SEQ ID NO: 1527 - protein, 23 aa, synthetic construct
  REGION 1..23: note = Synthetic Peptide
SVPTAQPQAEGSLAKATTAPATT

SEQ ID NO: 1528 - protein, 23 aa, synthetic construct
  REGION 1..23: note = Synthetic Peptide
SSVPTAQPQAEGSLAKATTAPAT

SEQ ID NO: 1529 - protein, 23 aa, synthetic construct
  REGION 1..23: note = Synthetic Peptide
ASSVPTAQPQAEGSLAKATTAPA

SEQ ID NO: 1530 - protein, 23 aa, synthetic construct
  REGION 1..23: note = Synthetic Peptide
QASSVPTAQPQAEGSLAKATTAP

SEQ ID NO: 1531 - protein, 23 aa, synthetic construct
  REGION 1..23: note = Synthetic Peptide
AQASSVPTAQPQAEGSLAKATTA

SEQ ID NO: 1532 - protein, 23 aa, synthetic construct
  REGION 1..23: note = Synthetic Peptide
KAQASSVPTAQPQAEGSLAKATT

SEQ ID NO: 1533 - protein, 23 aa, synthetic construct
  REGION 1..23: note = Synthetic Peptide
PKAQASSVPTAQPQAEGSLAKAT

SEQ ID NO: 1534 - protein, 23 aa, synthetic construct
  REGION 1..23: note = Synthetic Peptide
SPKAQASSVPTAQPQAEGSLAKA

SEQ ID NO: 1535 - protein, 23 aa, synthetic construct
  REGION 1..23: note = Synthetic Peptide
ESPKAQASSVPTAQPQAEGSLAK

SEQ ID NO: 1536 - protein, 23 aa, synthetic construct
  REGION 1..23: note = Synthetic Peptide
PESPKAQASSVPTAQPQAEGSLA

SEQ ID NO: 1537 - protein, 23 aa, synthetic construct
  REGION 1..23: note = Synthetic Peptide
WPESPKAQASSVPTAQPQAEGSL

SEQ ID NO: 1538 - protein, 23 aa, synthetic construct
  REGION 1..23: note = Synthetic Peptide
RWPESPKAQASSVPTAQPQAEGS

SEQ ID NO: 1539 - protein, 22 aa, synthetic construct
  REGION 1..22: note = Synthetic Peptide
RETKTPECPSHTQPLGVYLLTP

SEQ ID NO: 1540 - protein, 22 aa, synthetic construct
  REGION 1..22: note = Synthetic Peptide
ERETKTPECPSHTQPLGVYLLT

SEQ ID NO: 1541 - protein, 22 aa, synthetic construct
  REGION 1..22: note = Synthetic Peptide
EERETKTPECPSHTQPLGVYLL

SEQ ID NO: 1542 - protein, 22 aa, synthetic construct
  REGION 1..22: note = Synthetic Peptide
QEERETKTPECPSHTQPLGVYL

SEQ ID NO: 1543 - protein, 22 aa, synthetic construct
  REGION 1..22: note = Synthetic Peptide
EQEERETKTPECPSHTQPLGVY

SEQ ID NO: 1544 - protein, 22 aa, synthetic construct
  REGION 1..22: note = Synthetic Peptide
EEQEERETKTPECPSHTQPLGV

SEQ ID NO: 1545 - protein, 22 aa, synthetic construct
  REGION 1..22: note = Synthetic Peptide
KEEQEERETKTPECPSHTQPLG

SEQ ID NO: 1546 - protein, 22 aa, synthetic construct
  REGION 1..22: note = Synthetic Peptide
EKEEQEERETKTPECPSHTQPL

SEQ ID NO: 1547 - protein, 22 aa, synthetic construct
  REGION 1..22: note = Synthetic Peptide
KEKEEQEERETKTPECPSHTQP

SEQ ID NO: 1548 - protein, 22 aa, synthetic construct
  REGION 1..22: note = Synthetic Peptide
EKEKEEQEERETKTPECPSHTQ

SEQ ID NO: 1549 - protein, 22 aa, synthetic construct
  REGION 1..22: note = Synthetic Peptide
KEKEKEEQEERETKTPECPSHT

SEQ ID NO: 1550 - protein, 22 aa, synthetic construct
  REGION 1..22: note = Synthetic Peptide
KKEKEKEEQEERETKTPECPSH

SEQ ID NO: 1551 - protein, 22 aa, synthetic construct
  REGION 1..22: note = Synthetic Peptide
KKKEKEKEEQEERETKTPECPS

SEQ ID NO: 1552 - protein, 22 aa, synthetic construct
  REGION 1..22: note = Synthetic Peptide
EKKKEKEKEEQEERETKTPECP

SEQ ID NO: 1553 - protein, 22 aa, synthetic construct
  REGION 1..22: note = Synthetic Peptide
EEKKKEKEKEEQEERETKTPEC

SEQ ID NO: 1554 - protein, 22 aa, synthetic construct
  REGION 1..22: note = Synthetic Peptide
GEEKKKEKEKEEQEERETKTPE

SEQ ID NO: 1555 - protein, 22 aa, synthetic construct
  REGION 1..22: note = Synthetic Peptide
GGEEKKKEKEKEEQEERETKTP

SEQ ID NO: 1556 - protein, 22 aa, synthetic construct
  REGION 1..22: note = Synthetic Peptide
RGGEEKKKEKEKEEQEERETKT

SEQ ID NO: 1557 - protein, 22 aa, synthetic construct
  REGION 1..22: note = Synthetic Peptide
GRGGEEKKKEKEKEEQEERETK

SEQ ID NO: 1558 - protein, 22 aa, synthetic construct
  REGION 1..22: note = Synthetic Peptide
TGRGGEEKKKEKEKEEQEERET

SEQ ID NO: 1559 - protein, 22 aa, synthetic construct
  REGION 1..22: note = Synthetic Peptide
NTGRGGEEKKKEKEKEEQEERE

SEQ ID NO: 1560 - protein, 22 aa, synthetic construct
  REGION 1..22: note = Synthetic Peptide
RNTGRGGEEKKKEKEKEEQEER

SEQ ID NO: 1561 - protein, 22 aa, synthetic construct
  REGION 1..22: note = Synthetic Peptide
TRNTGRGGEEKKKEKEKEEQEE

SEQ ID NO: 1562 - protein, 22 aa, synthetic construct
  REGION 1..22: note = Synthetic Peptide
TTRNTGRGGEEKKKEKEKEEQE

SEQ ID NO: 1563 - protein, 22 aa, synthetic construct
  REGION 1..22: note = Synthetic Peptide
ATTRNTGRGGEEKKKEKEKEEQ

SEQ ID NO: 1564 - protein, 22 aa, synthetic construct
  REGION 1..22: note = Synthetic Peptide
PATTRNTGRGGEEKKKEKEKEE

SEQ ID NO: 1565 - protein, 22 aa, synthetic construct
  REGION 1..22: note = Synthetic Peptide
APATTRNTGRGGEEKKKEKEKE

SEQ ID NO: 1566 - protein, 22 aa, synthetic construct
  REGION 1..22: note = Synthetic Peptide
TAPATTRNTGRGGEEKKKEKEK

SEQ ID NO: 1567 - protein, 22 aa, synthetic construct
  REGION 1..22: note = Synthetic Peptide
TTAPATTRNTGRGGEEKKKEKE

SEQ ID NO: 1568 - protein, 22 aa, synthetic construct
  REGION 1..22: note = Synthetic Peptide
ATTAPATTRNTGRGGEEKKKEK

SEQ ID NO: 1569 - protein, 22 aa, synthetic construct
  REGION 1..22: note = Synthetic Peptide
KATTAPATTRNTGRGGEEKKKE

SEQ ID NO: 1570 - protein, 22 aa, synthetic construct
  REGION 1..22: note = Synthetic Peptide
AKATTAPATTRNTGRGGEEKKK

SEQ ID NO: 1571 - protein, 22 aa, synthetic construct
  REGION 1..22: note = Synthetic Peptide
LAKATTAPATTRNTGRGGEEKK

SEQ ID NO: 1572 - protein, 22 aa, synthetic construct
  REGION 1..22: note = Synthetic Peptide
SLAKATTAPATTRNTGRGGEEK

SEQ ID NO: 1573 - protein, 22 aa, synthetic construct
  REGION 1..22: note = Synthetic Peptide
GSLAKATTAPATTRNTGRGGEE

SEQ ID NO: 1574 - protein, 22 aa, synthetic construct
  REGION 1..22: note = Synthetic Peptide
EGSLAKATTAPATTRNTGRGGE

SEQ ID NO: 1575 - protein, 22 aa, synthetic construct
  REGION 1..22: note = Synthetic Peptide
AEGSLAKATTAPATTRNTGRGG

SEQ ID NO: 1576 - protein, 22 aa, synthetic construct
  REGION 1..22: note = Synthetic Peptide
QAEGSLAKATTAPATTRNTGRG

SEQ ID NO: 1577 - protein, 22 aa, synthetic construct
  REGION 1..22: note = Synthetic Peptide
PQAEGSLAKATTAPATTRNTGR

SEQ ID NO: 1578 - protein, 22 aa, synthetic construct
  REGION 1..22: note = Synthetic Peptide
QPQAEGSLAKATTAPATTRNTG

SEQ ID NO: 1579 - protein, 22 aa, synthetic construct
  REGION 1..22: note = Synthetic Peptide
AQPQAEGSLAKATTAPATTRNT

SEQ ID NO: 1580 - protein, 22 aa, synthetic construct
  REGION 1..22: note = Synthetic Peptide
TAQPQAEGSLAKATTAPATTRN

SEQ ID NO: 1581 - protein, 22 aa, synthetic construct
  REGION 1..22: note = Synthetic Peptide
PTAQPQAEGSLAKATTAPATTR

SEQ ID NO: 1582 - protein, 22 aa, synthetic construct
  REGION 1..22: note = Synthetic Peptide
VPTAQPQAEGSLAKATTAPATT

SEQ ID NO: 1583 - protein, 22 aa, synthetic construct
  REGION 1..22: note = Synthetic Peptide
SVPTAQPQAEGSLAKATTAPAT

SEQ ID NO: 1584 - protein, 22 aa, synthetic construct
  REGION 1..22: note = Synthetic Peptide
SSVPTAQPQAEGSLAKATTAPA

SEQ ID NO: 1585 - protein, 22 aa, synthetic construct
  REGION 1..22: note = Synthetic Peptide
ASSVPTAQPQAEGSLAKATTAP

SEQ ID NO: 1586 - protein, 22 aa, synthetic construct
  REGION 1..22: note = Synthetic Peptide
QASSVPTAQPQAEGSLAKATTA

SEQ ID NO: 1587 - protein, 22 aa, synthetic construct
  REGION 1..22: note = Synthetic Peptide
AQASSVPTAQPQAEGSLAKATT

SEQ ID NO: 1588 - protein, 22 aa, synthetic construct
  REGION 1..22: note = Synthetic Peptide
KAQASSVPTAQPQAEGSLAKAT

SEQ ID NO: 1589 - protein, 22 aa, synthetic construct
  REGION 1..22: note = Synthetic Peptide
PKAQASSVPTAQPQAEGSLAKA

SEQ ID NO: 1590 - protein, 22 aa, synthetic construct
  REGION 1..22: note = Synthetic Peptide
SPKAQASSVPTAQPQAEGSLAK

SEQ ID NO: 1591 - protein, 22 aa, synthetic construct
  REGION 1..22: note = Synthetic Peptide
ESPKAQASSVPTAQPQAEGSLA

SEQ ID NO: 1592 - protein, 22 aa, synthetic construct
  REGION 1..22: note = Synthetic Peptide
PESPKAQASSVPTAQPQAEGSL

SEQ ID NO: 1593 - protein, 22 aa, synthetic construct
  REGION 1..22: note = Synthetic Peptide
WPESPKAQASSVPTAQPQAEGS

SEQ ID NO: 1594 - protein, 22 aa, synthetic construct
  REGION 1..22: note = Synthetic Peptide
RWPESPKAQASSVPTAQPQAEG

SEQ ID NO: 1595 - protein, 21 aa, synthetic construct
  REGION 1..21: note = Synthetic Peptide
ETKTPECPSHTQPLGVYLLTP

SEQ ID NO: 1596 - protein, 21 aa, synthetic construct
  REGION 1..21: note = Synthetic Peptide
RETKTPECPSHTQPLGVYLLT

SEQ ID NO: 1597 - protein, 21 aa, synthetic construct
  REGION 1..21: note = Synthetic Peptide
ERETKTPECPSHTQPLGVYLL

SEQ ID NO: 1598 - protein, 21 aa, synthetic construct
  REGION 1..21: note = Synthetic Peptide
EERETKTPECPSHTQPLGVYL

SEQ ID NO: 1599 - protein, 21 aa, synthetic construct
  REGION 1..21: note = Synthetic Peptide
QEERETKTPECPSHTQPLGVY

SEQ ID NO: 1600 - protein, 21 aa, synthetic construct
  REGION 1..21: note = Synthetic Peptide
EQEERETKTPECPSHTQPLGV

SEQ ID NO: 1601 - protein, 21 aa, synthetic construct
  REGION 1..21: note = Synthetic Peptide
EEQEERETKTPECPSHTQPLG

SEQ ID NO: 1602 - protein, 21 aa, synthetic construct
  REGION 1..21: note = Synthetic Peptide
KEEQEERETKTPECPSHTQPL

SEQ ID NO: 1603 - protein, 21 aa, synthetic construct
  REGION 1..21: note = Synthetic Peptide
EKEEQEERETKTPECPSHTQP

SEQ ID NO: 1604 - protein, 21 aa, synthetic construct
  REGION 1..21: note = Synthetic Peptide
KEKEEQEERETKTPECPSHTQ

SEQ ID NO: 1605 - protein, 21 aa, synthetic construct
  REGION 1..21: note = Synthetic Peptide
EKEKEEQEERETKTPECPSHT

SEQ ID NO: 1606 - protein, 21 aa, synthetic construct
  REGION 1..21: note = Synthetic Peptide
KEKEKEEQEERETKTPECPSH

SEQ ID NO: 1607 - protein, 21 aa, synthetic construct
  REGION 1..21: note = Synthetic Peptide
KKEKEKEEQEERETKTPECPS

SEQ ID NO: 1608 - protein, 21 aa, synthetic construct
  REGION 1..21: note = Synthetic Peptide
KKKEKEKEEQEERETKTPECP

SEQ ID NO: 1609 - protein, 21 aa, synthetic construct
  REGION 1..21: note = Synthetic Peptide
EKKKEKEKEEQEERETKTPEC

SEQ ID NO: 1610 - protein, 21 aa, synthetic construct
  REGION 1..21: note = Synthetic Peptide
EEKKKEKEKEEQEERETKTPE

SEQ ID NO: 1611 - protein, 21 aa, synthetic construct
  REGION 1..21: note = Synthetic Peptide
GEEKKKEKEKEEQEERETKTP

SEQ ID NO: 1612 - protein, 21 aa, synthetic construct
  REGION 1..21: note = Synthetic Peptide
GGEEKKKEKEKEEQEERETKT

SEQ ID NO: 1613 - protein, 21 aa, synthetic construct
  REGION 1..21: note = Synthetic Peptide
RGGEEKKKEKEKEEQEERETK

SEQ ID NO: 1614 - protein, 21 aa, synthetic construct
  REGION 1..21: note = Synthetic Peptide
GRGGEEKKKEKEKEEQEERET

SEQ ID NO: 1615 - protein, 21 aa, synthetic construct
  REGION 1..21: note = Synthetic Peptide
TGRGGEEKKKEKEKEEQEERE

SEQ ID NO: 1616 - protein, 21 aa, synthetic construct
  REGION 1..21: note = Synthetic Peptide
NTGRGGEEKKKEKEKEEQEER

SEQ ID NO: 1617 - protein, 21 aa, synthetic construct
  REGION 1..21: note = Synthetic Peptide
RNTGRGGEEKKKEKEKEEQEE

SEQ ID NO: 1618 - protein, 21 aa, synthetic construct
  REGION 1..21: note = Synthetic Peptide
TRNTGRGGEEKKKEKEKEEQE

SEQ ID NO: 1619 - protein, 21 aa, synthetic construct
  REGION 1..21: note = Synthetic Peptide
TTRNTGRGGEEKKKEKEKEEQ

SEQ ID NO: 1620 - protein, 21 aa, synthetic construct
  REGION 1..21: note = Synthetic Peptide
ATTRNTGRGGEEKKKEKEKEE

SEQ ID NO: 1621 - protein, 21 aa, synthetic construct
  REGION 1..21: note = Synthetic Peptide
PATTRNTGRGGEEKKKEKEKE

SEQ ID NO: 1622 - protein, 21 aa, synthetic construct
  REGION 1..21: note = Synthetic Peptide
APATTRNTGRGGEEKKKEKEK

SEQ ID NO: 1623 - protein, 21 aa, synthetic construct
  REGION 1..21: note = Synthetic Peptide
TAPATTRNTGRGGEEKKKEKE

SEQ ID NO: 1624 - protein, 21 aa, synthetic construct
  REGION 1..21: note = Synthetic Peptide
TTAPATTRNTGRGGEEKKKEK

SEQ ID NO: 1625 - protein, 21 aa, synthetic construct
  REGION 1..21: note = Synthetic Peptide
ATTAPATTRNTGRGGEEKKKE

SEQ ID NO: 1626 - protein, 21 aa, synthetic construct
  REGION 1..21: note = Synthetic Peptide
KATTAPATTRNTGRGGEEKKK

SEQ ID NO: 1627 - protein, 21 aa, synthetic construct
  REGION 1..21: note = Synthetic Peptide
AKATTAPATTRNTGRGGEEKK

SEQ ID NO: 1628 - protein, 21 aa, synthetic construct
  REGION 1..21: note = Synthetic Peptide
LAKATTAPATTRNTGRGGEEK

SEQ ID NO: 1629 - protein, 21 aa, synthetic construct
  REGION 1..21: note = Synthetic Peptide
SLAKATTAPATTRNTGRGGEE

SEQ ID NO: 1630 - protein, 21 aa, synthetic construct
  REGION 1..21: note = Synthetic Peptide
GSLAKATTAPATTRNTGRGGE

SEQ ID NO: 1631 - protein, 21 aa, synthetic construct
  REGION 1..21: note = Synthetic Peptide
EGSLAKATTAPATTRNTGRGG

SEQ ID NO: 1632 - protein, 21 aa, synthetic construct
  REGION 1..21: note = Synthetic Peptide
AEGSLAKATTAPATTRNTGRG

SEQ ID NO: 1633 - protein, 21 aa, synthetic construct
  REGION 1..21: note = Synthetic Peptide
QAEGSLAKATTAPATTRNTGR

SEQ ID NO: 1634 - protein, 21 aa, synthetic construct
  REGION 1..21: note = Synthetic Peptide
PQAEGSLAKATTAPATTRNTG

SEQ ID NO: 1635 - protein, 21 aa, synthetic construct
  REGION 1..21: note = Synthetic Peptide
QPQAEGSLAKATTAPATTRNT

SEQ ID NO: 1636 - protein, 21 aa, synthetic construct
  REGION 1..21: note = Synthetic Peptide
AQPQAEGSLAKATTAPATTRN

SEQ ID NO: 1637 - protein, 21 aa, synthetic construct
  REGION 1..21: note = Synthetic Peptide
TAQPQAEGSLAKATTAPATTR

SEQ ID NO: 1638 - protein, 21 aa, synthetic construct
  REGION 1..21: note = Synthetic Peptide
PTAQPQAEGSLAKATTAPATT

SEQ ID NO: 1639 - protein, 21 aa, synthetic construct
  REGION 1..21: note = Synthetic Peptide
VPTAQPQAEGSLAKATTAPAT

SEQ ID NO: 1640 - protein, 21 aa, synthetic construct
  REGION 1..21: note = Synthetic Peptide
SVPTAQPQAEGSLAKATTAPA

SEQ ID NO: 1641 - protein, 21 aa, synthetic construct
  REGION 1..21: note = Synthetic Peptide
SSVPTAQPQAEGSLAKATTAP

SEQ ID NO: 1642 - protein, 21 aa, synthetic construct
  REGION 1..21: note = Synthetic Peptide
ASSVPTAQPQAEGSLAKATTA

SEQ ID NO: 1643 - protein, 21 aa, synthetic construct
  REGION 1..21: note = Synthetic Peptide
QASSVPTAQPQAEGSLAKATT

SEQ ID NO: 1644 - protein, 21 aa, synthetic construct
  REGION 1..21: note = Synthetic Peptide
AQASSVPTAQPQAEGSLAKAT

SEQ ID NO: 1645 - protein, 21 aa, synthetic construct
  REGION 1..21: note = Synthetic Peptide
KAQASSVPTAQPQAEGSLAKA

SEQ ID NO: 1646 - protein, 21 aa, synthetic construct
  REGION 1..21: note = Synthetic Peptide
PKAQASSVPTAQPQAEGSLAK

SEQ ID NO: 1647 - protein, 21 aa, synthetic construct
  REGION 1..21: note = Synthetic Peptide
SPKAQASSVPTAQPQAEGSLA

SEQ ID NO: 1648 - protein, 21 aa, synthetic construct
  REGION 1..21: note = Synthetic Peptide
ESPKAQASSVPTAQPQAEGSL

SEQ ID NO: 1649 - protein, 21 aa, synthetic construct
  REGION 1..21: note = Synthetic Peptide
PESPKAQASSVPTAQPQAEGS

SEQ ID NO: 1650 - protein, 21 aa, synthetic construct
  REGION 1..21: note = Synthetic Peptide
WPESPKAQASSVPTAQPQAEG

SEQ ID NO: 1651 - protein, 21 aa, synthetic construct
  REGION 1..21: note = Synthetic Peptide
RWPESPKAQASSVPTAQPQAE

SEQ ID NO: 1652 - protein, 20 aa, synthetic construct
  REGION 1..20: note = Synthetic Peptide
RWPESPKAQASSVPTAQPQA

SEQ ID NO: 1653 - protein, 20 aa, synthetic construct
  REGION 1..20: note = Synthetic Peptide
WPESPKAQASSVPTAQPQAE

SEQ ID NO: 1654 - protein, 20 aa, synthetic construct
  REGION 1..20: note = Synthetic Peptide
PESPKAQASSVPTAQPQAEG

SEQ ID NO: 1655 - protein, 20 aa, synthetic construct
  REGION 1..20: note = Synthetic Peptide
ESPKAQASSVPTAQPQAEGS

SEQ ID NO: 1656 - protein, 20 aa, synthetic construct
  REGION 1..20: note = Synthetic Peptide
SPKAQASSVPTAQPQAEGSL

SEQ ID NO: 1657 - protein, 20 aa, synthetic construct
  REGION 1..20: note = Synthetic Peptide
PKAQASSVPTAQPQAEGSLA

SEQ ID NO: 1658 - protein, 20 aa, synthetic construct
  REGION 1..20: note = Synthetic Peptide
KAQASSVPTAQPQAEGSLAK

SEQ ID NO: 1659 - protein, 20 aa, synthetic construct
  REGION 1..20: note = Synthetic Peptide
AQASSVPTAQPQAEGSLAKA

SEQ ID NO: 1660 - protein, 20 aa, synthetic construct
  REGION 1..20: note = Synthetic Peptide
QASSVPTAQPQAEGSLAKAT

SEQ ID NO: 1661 - protein, 20 aa, synthetic construct
  REGION 1..20: note = Synthetic Peptide
ASSVPTAQPQAEGSLAKATT

SEQ ID NO: 1662 - protein, 20 aa, synthetic construct
  REGION 1..20: note = Synthetic Peptide
SSVPTAQPQAEGSLAKATTA

SEQ ID NO: 1663 - protein, 20 aa, synthetic construct
  REGION 1..20: note = Synthetic Peptide
SVPTAQPQAEGSLAKATTAP

SEQ ID NO: 1664 - protein, 20 aa, synthetic construct
  REGION 1..20: note = Synthetic Peptide
VPTAQPQAEGSLAKATTAPA

SEQ ID NO: 1665 - protein, 20 aa, synthetic construct
  REGION 1..20: note = Synthetic Peptide
PTAQPQAEGSLAKATTAPAT

SEQ ID NO: 1666 - protein, 20 aa, synthetic construct
  REGION 1..20: note = Synthetic Peptide
TAQPQAEGSLAKATTAPATT

SEQ ID NO: 1667 - protein, 20 aa, synthetic construct
  REGION 1..20: note = Synthetic Peptide
AQPQAEGSLAKATTAPATTR

SEQ ID NO: 1668 - protein, 20 aa, synthetic construct
  REGION 1..20: note = Synthetic Peptide
QPQAEGSLAKATTAPATTRN

SEQ ID NO: 1669 - protein, 20 aa, synthetic construct
  REGION 1..20: note = Synthetic Peptide
PQAEGSLAKATTAPATTRNT

SEQ ID NO: 1670 - protein, 20 aa, synthetic construct
  REGION 1..20: note = Synthetic Peptide
QAEGSLAKATTAPATTRNTG

SEQ ID NO: 1671 - protein, 20 aa, synthetic construct
  REGION 1..20: note = Synthetic Peptide
AEGSLAKATTAPATTRNTGR

SEQ ID NO: 1672 - protein, 20 aa, synthetic construct
  REGION 1..20: note = Synthetic Peptide
EGSLAKATTAPATTRNTGRG

SEQ ID NO: 1673 - protein, 20 aa, synthetic construct
  REGION 1..20: note = Synthetic Peptide
GSLAKATTAPATTRNTGRGG

SEQ ID NO: 1674 - protein, 20 aa, synthetic construct
  REGION 1..20: note = Synthetic Peptide
SLAKATTAPATTRNTGRGGE

SEQ ID NO: 1675 - protein, 20 aa, synthetic construct
  REGION 1..20: note = Synthetic Peptide
LAKATTAPATTRNTGRGGEE

SEQ ID NO: 1676 - protein, 20 aa, synthetic construct
  REGION 1..20: note = Synthetic Peptide
AKATTAPATTRNTGRGGEEK

SEQ ID NO: 1677 - protein, 20 aa, synthetic construct
  REGION 1..20: note = Synthetic Peptide
KATTAPATTRNTGRGGEEKK

SEQ ID NO: 1678 - protein, 20 aa, synthetic construct
  REGION 1..20: note = Synthetic Peptide
ATTAPATTRNTGRGGEEKKK

SEQ ID NO: 1679 - protein, 20 aa, synthetic construct
  REGION 1..20: note = Synthetic Peptide
TTAPATTRNTGRGGEEKKKE

SEQ ID NO: 1680 - protein, 20 aa, synthetic construct
  REGION 1..20: note = Synthetic Peptide
TAPATTRNTGRGGEEKKKEK

SEQ ID NO: 1681 - protein, 20 aa, synthetic construct
  REGION 1..20: note = Synthetic Peptide
APATTRNTGRGGEEKKKEKE

SEQ ID NO: 1682 - protein, 20 aa, synthetic construct
  REGION 1..20: note = Synthetic Peptide
PATTRNTGRGGEEKKKEKEK

SEQ ID NO: 1683 - protein, 20 aa, synthetic construct
  REGION 1..20: note = Synthetic Peptide
ATTRNTGRGGEEKKKEKEKE

SEQ ID NO: 1684 - protein, 20 aa, synthetic construct
  REGION 1..20: note = Synthetic Peptide
TTRNTGRGGEEKKKEKEKEE

SEQ ID NO: 1685 - protein, 20 aa, synthetic construct
  REGION 1..20: note = Synthetic Peptide
TRNTGRGGEEKKKEKEKEEQ

SEQ ID NO: 1686 - protein, 20 aa, synthetic construct
  REGION 1..20: note = Synthetic Peptide
RNTGRGGEEKKKEKEKEEQE

SEQ ID NO: 1687 - protein, 20 aa, synthetic construct
  REGION 1..20: note = Synthetic Peptide
NTGRGGEEKKKEKEKEEQEE

SEQ ID NO: 1688 - protein, 20 aa, synthetic construct
  REGION 1..20: note = Synthetic Peptide
TGRGGEEKKKEKEKEEQEER

SEQ ID NO: 1689 - protein, 20 aa, synthetic construct
  REGION 1..20: note = Synthetic Peptide
GRGGEEKKKEKEKEEQEERE

SEQ ID NO: 1690 - protein, 20 aa, synthetic construct
  REGION 1..20: note = Synthetic Peptide
RGGEEKKKEKEKEEQEERET

SEQ ID NO: 1691 - protein, 20 aa, synthetic construct
  REGION 1..20: note = Synthetic Peptide
GGEEKKKEKEKEEQEERETK

SEQ ID NO: 1692 - protein, 20 aa, synthetic construct
  REGION 1..20: note = Synthetic Peptide
GEEKKKEKEKEEQEERETKT

SEQ ID NO: 1693 - protein, 20 aa, synthetic construct
  REGION 1..20: note = Synthetic Peptide
EEKKKEKEKEEQEERETKTP

SEQ ID NO: 1694 - protein, 20 aa, synthetic construct
  REGION 1..20: note = Synthetic Peptide
EKKKEKEKEEQEERETKTPE

SEQ ID NO: 1695 - protein, 20 aa, synthetic construct
  REGION 1..20: note = Synthetic Peptide
KKKEKEKEEQEERETKTPEC

SEQ ID NO: 1696 - protein, 20 aa, synthetic construct
  REGION 1..20: note = Synthetic Peptide
KKEKEKEEQEERETKTPECP

SEQ ID NO: 1697 - protein, 20 aa, synthetic construct
  REGION 1..20: note = Synthetic Peptide
KEKEKEEQEERETKTPECPS

SEQ ID NO: 1698 - protein, 20 aa, synthetic construct
  REGION 1..20: note = Synthetic Peptide
EKEKEEQEERETKTPECPSH

SEQ ID NO: 1699 - protein, 20 aa, synthetic construct
  REGION 1..20: note = Synthetic Peptide
KEKEEQEERETKTPECPSHT

SEQ ID NO: 1700 - protein, 20 aa, synthetic construct
  REGION 1..20: note = Synthetic Peptide
EKEEQEERETKTPECPSHTQ

SEQ ID NO: 1701 - protein, 20 aa, synthetic construct
  REGION 1..20: note = Synthetic Peptide
KEEQEERETKTPECPSHTQP

SEQ ID NO: 1702 - protein, 20 aa, synthetic construct
  REGION 1..20: note = Synthetic Peptide
EEQEERETKTPECPSHTQPL

SEQ ID NO: 1703 - protein, 20 aa, synthetic construct
  REGION 1..20: note = Synthetic Peptide
EQEERETKTPECPSHTQPLG

SEQ ID NO: 1704 - protein, 20 aa, synthetic construct
  REGION 1..20: note = Synthetic Peptide
QEERETKTPECPSHTQPLGV

SEQ ID NO: 1705 - protein, 20 aa, synthetic construct
  REGION 1..20: note = Synthetic Peptide
EERETKTPECPSHTQPLGVY

SEQ ID NO: 1706 - protein, 20 aa, synthetic construct
  REGION 1..20: note = Synthetic Peptide
ERETKTPECPSHTQPLGVYL

SEQ ID NO: 1707 - protein, 20 aa, synthetic construct
  REGION 1..20: note = Synthetic Peptide
RETKTPECPSHTQPLGVYLL

SEQ ID NO: 1708 - protein, 20 aa, synthetic construct
  REGION 1..20: note = Synthetic Peptide
ETKTPECPSHTQPLGVYLLT

SEQ ID NO: 1709 - protein, 20 aa, synthetic construct
  REGION 1..20: note = Synthetic Peptide
TKTPECPSHTQPLGVYLLTP

SEQ ID NO: 1710 - protein, 19 aa, synthetic construct
  REGION 1..19: note = Synthetic Peptide
RWPESPKAQASSVPTAQPQ

SEQ ID NO: 1711 - protein, 19 aa, synthetic construct
  REGION 1..19: note = Synthetic Peptide
WPESPKAQASSVPTAQPQA

SEQ ID NO: 1712 - protein, 19 aa, synthetic construct
  REGION 1..19: note = Synthetic Peptide
PESPKAQASSVPTAQPQAE

SEQ ID NO: 1713 - protein, 19 aa, synthetic construct
  REGION 1..19: note = Synthetic Peptide
ESPKAQASSVPTAQPQAEG

SEQ ID NO: 1714 - protein, 19 aa, synthetic construct
  REGION 1..19: note = Synthetic Peptide
SPKAQASSVPTAQPQAEGS

SEQ ID NO: 1715 - protein, 19 aa, synthetic construct
  REGION 1..19: note = Synthetic Peptide
PKAQASSVPTAQPQAEGSL

SEQ ID NO: 1716 - protein, 19 aa, synthetic construct
  REGION 1..19: note = Synthetic Peptide
KAQASSVPTAQPQAEGSLA

SEQ ID NO: 1717 - protein, 19 aa, synthetic construct
  REGION 1..19: note = Synthetic Peptide
AQASSVPTAQPQAEGSLAK

SEQ ID NO: 1718 - protein, 19 aa, synthetic construct
  REGION 1..19: note = Synthetic Peptide
QASSVPTAQPQAEGSLAKA

SEQ ID NO: 1719 - protein, 19 aa, synthetic construct
  REGION 1..19: note = Synthetic Peptide
ASSVPTAQPQAEGSLAKAT

SEQ ID NO: 1720 - protein, 19 aa, synthetic construct
  REGION 1..19: note = Synthetic Peptide
SSVPTAQPQAEGSLAKATT

SEQ ID NO: 1721 - protein, 19 aa, synthetic construct
  REGION 1..19: note = Synthetic Peptide
SVPTAQPQAEGSLAKATTA

SEQ ID NO: 1722 - protein, 19 aa, synthetic construct
  REGION 1..19: note = Synthetic Peptide
VPTAQPQAEGSLAKATTAP

SEQ ID NO: 1723 - protein, 19 aa, synthetic construct
  REGION 1..19: note = Synthetic Peptide
PTAQPQAEGSLAKATTAPA

SEQ ID NO: 1724 - protein, 19 aa, synthetic construct
  REGION 1..19: note = Synthetic Peptide
TAQPQAEGSLAKATTAPAT

SEQ ID NO: 1725 - protein, 19 aa, synthetic construct
  REGION 1..19: note = Synthetic Peptide
AQPQAEGSLAKATTAPATT

SEQ ID NO: 1726 - protein, 19 aa, synthetic construct
  REGION 1..19: note = Synthetic Peptide
QPQAEGSLAKATTAPATTR

SEQ ID NO: 1727 - protein, 19 aa, synthetic construct
  REGION 1..19: note = Synthetic Peptide
PQAEGSLAKATTAPATTRN

SEQ ID NO: 1728 - protein, 19 aa, synthetic construct
  REGION 1..19: note = Synthetic Peptide
QAEGSLAKATTAPATTRNT

SEQ ID NO: 1729 - protein, 19 aa, synthetic construct
  REGION 1..19: note = Synthetic Peptide
AEGSLAKATTAPATTRNTG

SEQ ID NO: 1730 - protein, 19 aa, synthetic construct
  REGION 1..19: note = Synthetic Peptide
EGSLAKATTAPATTRNTGR

SEQ ID NO: 1731 - protein, 19 aa, synthetic construct
  REGION 1..19: note = Synthetic Peptide
GSLAKATTAPATTRNTGRG

SEQ ID NO: 1732 - protein, 19 aa, synthetic construct
  REGION 1..19: note = Synthetic Peptide
SLAKATTAPATTRNTGRGG

SEQ ID NO: 1733 - protein, 19 aa, synthetic construct
  REGION 1..19: note = Synthetic Peptide
LAKATTAPATTRNTGRGGE

SEQ ID NO: 1734 - protein, 19 aa, synthetic construct
  REGION 1..19: note = Synthetic Peptide
AKATTAPATTRNTGRGGEE

SEQ ID NO: 1735 - protein, 19 aa, synthetic construct
  REGION 1..19: note = Synthetic Peptide
KATTAPATTRNTGRGGEEK

SEQ ID NO: 1736 - protein, 19 aa, synthetic construct
  REGION 1..19: note = Synthetic Peptide
ATTAPATTRNTGRGGEEKK

SEQ ID NO: 1737 - protein, 19 aa, synthetic construct
  REGION 1..19: note = Synthetic Peptide
TTAPATTRNTGRGGEEKKK

SEQ ID NO: 1738 - protein, 19 aa, synthetic construct
  REGION 1..19: note = Synthetic Peptide
TAPATTRNTGRGGEEKKKE

SEQ ID NO: 1739 - protein, 19 aa, synthetic construct
  REGION 1..19: note = Synthetic Peptide
APATTRNTGRGGEEKKKEK

SEQ ID NO: 1740 - protein, 19 aa, synthetic construct
  REGION 1..19: note = Synthetic Peptide
PATTRNTGRGGEEKKKEKE

SEQ ID NO: 1741 - protein, 19 aa, synthetic construct
  REGION 1..19: note = Synthetic Peptide
ATTRNTGRGGEEKKKEKEK

SEQ ID NO: 1742 - protein, 19 aa, synthetic construct
  REGION 1..19: note = Synthetic Peptide
TTRNTGRGGEEKKKEKEKE

SEQ ID NO: 1743 - protein, 19 aa, synthetic construct
  REGION 1..19: note = Synthetic Peptide
TRNTGRGGEEKKKEKEKEE

SEQ ID NO: 1744 - protein, 19 aa, synthetic construct
  REGION 1..19: note = Synthetic Peptide
RNTGRGGEEKKKEKEKEEQ

SEQ ID NO: 1745 - protein, 19 aa, synthetic construct
  REGION 1..19: note = Synthetic Peptide
NTGRGGEEKKKEKEKEEQE

SEQ ID NO: 1746 - protein, 19 aa, synthetic construct
  REGION 1..19: note = Synthetic Peptide
TGRGGEEKKKEKEKEEQEE

SEQ ID NO: 1747 - protein, 19 aa, synthetic construct
  REGION 1..19: note = Synthetic Peptide
GRGGEEKKKEKEKEEQEER

SEQ ID NO: 1748 - protein, 19 aa, synthetic construct
  REGION 1..19: note = Synthetic Peptide
RGGEEKKKEKEKEEQEERE

SEQ ID NO: 1749 - protein, 19 aa, synthetic construct
  REGION 1..19: note = Synthetic Peptide
GGEEKKKEKEKEEQEERET

SEQ ID NO: 1750 - protein, 19 aa, synthetic construct
  REGION 1..19: note = Synthetic Peptide
GEEKKKEKEKEEQEERETK

SEQ ID NO: 1751 - protein, 19 aa, synthetic construct
  REGION 1..19: note = Synthetic Peptide
EEKKKEKEKEEQEERETKT

SEQ ID NO: 1752 - protein, 19 aa, synthetic construct
  REGION 1..19: note = Synthetic Peptide
EKKKEKEKEEQEERETKTP

SEQ ID NO: 1753 - protein, 19 aa, synthetic construct
  REGION 1..19: note = Synthetic Peptide
KKKEKEKEEQEERETKTPE

SEQ ID NO: 1754 - protein, 19 aa, synthetic construct
  REGION 1..19: note = Synthetic Peptide
KKEKEKEEQEERETKTPEC

SEQ ID NO: 1755 - protein, 19 aa, synthetic construct
  REGION 1..19: note = Synthetic Peptide
KEKEKEEQEERETKTPECP

SEQ ID NO: 1756 - protein, 19 aa, synthetic construct
  REGION 1..19: note = Synthetic Peptide
EKEKEEQEERETKTPECPS

SEQ ID NO: 1757 - protein, 19 aa, synthetic construct
  REGION 1..19: note = Synthetic Peptide
KEKEEQEERETKTPECPSH

SEQ ID NO: 1758 - protein, 19 aa, synthetic construct
  REGION 1..19: note = Synthetic Peptide
EKEEQEERETKTPECPSHT

SEQ ID NO: 1759 - protein, 19 aa, synthetic construct
  REGION 1..19: note = Synthetic Peptide
KEEQEERETKTPECPSHTQ

SEQ ID NO: 1760 - protein, 19 aa, synthetic construct
  REGION 1..19: note = Synthetic Peptide
EEQEERETKTPECPSHTQP

SEQ ID NO: 1761 - protein, 19 aa, synthetic construct
  REGION 1..19: note = Synthetic Peptide
EQEERETKTPECPSHTQPL

SEQ ID NO: 1762 - protein, 19 aa, synthetic construct
  REGION 1..19: note = Synthetic Peptide
QEERETKTPECPSHTQPLG

SEQ ID NO: 1763 - protein, 19 aa, synthetic construct
  REGION 1..19: note = Synthetic Peptide
EERETKTPECPSHTQPLGV

SEQ ID NO: 1764 - protein, 19 aa, synthetic construct
  REGION 1..19: note = Synthetic Peptide
ERETKTPECPSHTQPLGVY

SEQ ID NO: 1765 - protein, 19 aa, synthetic construct
  REGION 1..19: note = Synthetic Peptide
RETKTPECPSHTQPLGVYL

SEQ ID NO: 1766 - protein, 19 aa, synthetic construct
  REGION 1..19: note = Synthetic Peptide
ETKTPECPSHTQPLGVYLL

SEQ ID NO: 1767 - protein, 19 aa, synthetic construct
  REGION 1..19: note = Synthetic Peptide
TKTPECPSHTQPLGVYLLT

SEQ ID NO: 1768 - protein, 19 aa, synthetic construct
  REGION 1..19: note = Synthetic Peptide
KTPECPSHTQPLGVYLLTP

SEQ ID NO: 1769 - protein, 18 aa, synthetic construct
  REGION 1..18: note = Synthetic Peptide
RWPESPKAQASSVPTAQP

SEQ ID NO: 1770 - protein, 18 aa, synthetic construct
  REGION 1..18: note = Synthetic Peptide
WPESPKAQASSVPTAQPQ

SEQ ID NO: 1771 - protein, 18 aa, synthetic construct
  REGION 1..18: note = Synthetic Peptide
PESPKAQASSVPTAQPQA

SEQ ID NO: 1772 - protein, 18 aa, synthetic construct
  REGION 1..18: note = Synthetic Peptide
ESPKAQASSVPTAQPQAE

SEQ ID NO: 1773 - protein, 18 aa, synthetic construct
  REGION 1..18: note = Synthetic Peptide
SPKAQASSVPTAQPQAEG

SEQ ID NO: 1774 - protein, 18 aa, synthetic construct
  REGION 1..18: note = Synthetic Peptide
PKAQASSVPTAQPQAEGS

SEQ ID NO: 1775 - protein, 18 aa, synthetic construct
  REGION 1..18: note = Synthetic Peptide
KAQASSVPTAQPQAEGSL

SEQ ID NO: 1776 - protein, 18 aa, synthetic construct
  REGION 1..18: note = Synthetic Peptide
AQASSVPTAQPQAEGSLA

SEQ ID NO: 1777 - protein, 18 aa, synthetic construct
  REGION 1..18: note = Synthetic Peptide
QASSVPTAQPQAEGSLAK

SEQ ID NO: 1778 - protein, 18 aa, synthetic construct
  REGION 1..18: note = Synthetic Peptide
ASSVPTAQPQAEGSLAKA

SEQ ID NO: 1779 - protein, 18 aa, synthetic construct
  REGION 1..18: note = Synthetic Peptide
SSVPTAQPQAEGSLAKAT

SEQ ID NO: 1780 - protein, 18 aa, synthetic construct
  REGION 1..18: note = Synthetic Peptide
SVPTAQPQAEGSLAKATT

SEQ ID NO: 1781 - protein, 18 aa, synthetic construct
  REGION 1..18: note = Synthetic Peptide
VPTAQPQAEGSLAKATTA

SEQ ID NO: 1782 - protein, 18 aa, synthetic construct
  REGION 1..18: note = Synthetic Peptide
PTAQPQAEGSLAKATTAP

SEQ ID NO: 1783 - protein, 18 aa, synthetic construct
  REGION 1..18: note = Synthetic Peptide
TAQPQAEGSLAKATTAPA

SEQ ID NO: 1784 - protein, 18 aa, synthetic construct
  REGION 1..18: note = Synthetic Peptide
AQPQAEGSLAKATTAPAT

SEQ ID NO: 1785 - protein, 18 aa, synthetic construct
  REGION 1..18: note = Synthetic Peptide
QPQAEGSLAKATTAPATT

SEQ ID NO: 1786 - protein, 18 aa, synthetic construct
  REGION 1..18: note = Synthetic Peptide
PQAEGSLAKATTAPATTR

SEQ ID NO: 1787 - protein, 18 aa, synthetic construct
  REGION 1..18: note = Synthetic Peptide
QAEGSLAKATTAPATTRN

SEQ ID NO: 1788 - protein, 18 aa, synthetic construct
  REGION 1..18: note = Synthetic Peptide
AEGSLAKATTAPATTRNT

SEQ ID NO: 1789 - protein, 18 aa, synthetic construct
  REGION 1..18: note = Synthetic Peptide
EGSLAKATTAPATTRNTG

SEQ ID NO: 1790 - protein, 18 aa, synthetic construct
  REGION 1..18: note = Synthetic Peptide
GSLAKATTAPATTRNTGR

SEQ ID NO: 1791 - protein, 18 aa, synthetic construct
  REGION 1..18: note = Synthetic Peptide
SLAKATTAPATTRNTGRG

SEQ ID NO: 1792 - protein, 18 aa, synthetic construct
  REGION 1..18: note = Synthetic Peptide
LAKATTAPATTRNTGRGG

SEQ ID NO: 1793 - protein, 18 aa, synthetic construct
  REGION 1..18: note = Synthetic Peptide
AKATTAPATTRNTGRGGE

SEQ ID NO: 1794 - protein, 18 aa, synthetic construct
  REGION 1..18: note = Synthetic Peptide
KATTAPATTRNTGRGGEE

SEQ ID NO: 1795 - protein, 18 aa, synthetic construct
  REGION 1..18: note = Synthetic Peptide
ATTAPATTRNTGRGGEEK

SEQ ID NO: 1796 - protein, 18 aa, synthetic construct
  REGION 1..18: note = Synthetic Peptide
TTAPATTRNTGRGGEEKK

SEQ ID NO: 1797 - protein, 18 aa, synthetic construct
  REGION 1..18: note = Synthetic Peptide
TAPATTRNTGRGGEEKKK

SEQ ID NO: 1798 - protein, 18 aa, synthetic construct
  REGION 1..18: note = Synthetic Peptide
APATTRNTGRGGEEKKKE

SEQ ID NO: 1799 - protein, 18 aa, synthetic construct
  REGION 1..18: note = Synthetic Peptide
PATTRNTGRGGEEKKKEK

SEQ ID NO: 1800 - protein, 18 aa, synthetic construct
  REGION 1..18: note = Synthetic Peptide
ATTRNTGRGGEEKKKEKE

SEQ ID NO: 1801 - protein, 18 aa, synthetic construct
  REGION 1..18: note = Synthetic Peptide
TTRNTGRGGEEKKKEKEK

SEQ ID NO: 1802 - protein, 18 aa, synthetic construct
  REGION 1..18: note = Synthetic Peptide
TRNTGRGGEEKKKEKEKE

SEQ ID NO: 1803 - protein, 18 aa, synthetic construct
  REGION 1..18: note = Synthetic Peptide
RNTGRGGEEKKKEKEKEE

SEQ ID NO: 1804 - protein, 18 aa, synthetic construct
  REGION 1..18: note = Synthetic Peptide
NTGRGGEEKKKEKEKEEQ

SEQ ID NO: 1805 - protein, 18 aa, synthetic construct
  REGION 1..18: note = Synthetic Peptide
TGRGGEEKKKEKEKEEQE

SEQ ID NO: 1806 - protein, 18 aa, synthetic construct
  REGION 1..18: note = Synthetic Peptide
GRGGEEKKKEKEKEEQEE

SEQ ID NO: 1807 - protein, 18 aa, synthetic construct
  REGION 1..18: note = Synthetic Peptide
RGGEEKKKEKEKEEQEER

SEQ ID NO: 1808 - protein, 18 aa, synthetic construct
  REGION 1..18: note = Synthetic Peptide
GGEEKKKEKEKEEQEERE

SEQ ID NO: 1809 - protein, 18 aa, synthetic construct
  REGION 1..18: note = Synthetic Peptide
GEEKKKEKEKEEQEERET

SEQ ID NO: 1810 - protein, 18 aa, synthetic construct
  REGION 1..18: note = Synthetic Peptide
EEKKKEKEKEEQEERETK

SEQ ID NO: 1811 - protein, 18 aa, synthetic construct
  REGION 1..18: note = Synthetic Peptide
EKKKEKEKEEQEERETKT

SEQ ID NO: 1812 - protein, 18 aa, synthetic construct
  REGION 1..18: note = Synthetic Peptide
KKKEKEKEEQEERETKTP

SEQ ID NO: 1813 - protein, 18 aa, synthetic construct
  REGION 1..18: note = Synthetic Peptide
KKEKEKEEQEERETKTPE

SEQ ID NO: 1814 - protein, 18 aa, synthetic construct
  REGION 1..18: note = Synthetic Peptide
KEKEKEEQEERETKTPEC

SEQ ID NO: 1815 - protein, 18 aa, synthetic construct
  REGION 1..18: note = Synthetic Peptide
EKEKEEQEERETKTPECP

SEQ ID NO: 1816 - protein, 18 aa, synthetic construct
  REGION 1..18: note = Synthetic Peptide
KEKEEQEERETKTPECPS

SEQ ID NO: 1817 - protein, 18 aa, synthetic construct
  REGION 1..18: note = Synthetic Peptide
EKEEQEERETKTPECPSH

SEQ ID NO: 1818 - protein, 18 aa, synthetic construct
  REGION 1..18: note = Synthetic Peptide
KEEQEERETKTPECPSHT

SEQ ID NO: 1819 - protein, 18 aa, synthetic construct
  REGION 1..18: note = Synthetic Peptide
EEQEERETKTPECPSHTQ

SEQ ID NO: 1820 - protein, 18 aa, synthetic construct
  REGION 1..18: note = Synthetic Peptide
EQEERETKTPECPSHTQP

SEQ ID NO: 1821 - protein, 18 aa, synthetic construct
  REGION 1..18: note = Synthetic Peptide
QEERETKTPECPSHTQPL

SEQ ID NO: 1822 - protein, 18 aa, synthetic construct
  REGION 1..18: note = Synthetic Peptide
EERETKTPECPSHTQPLG

SEQ ID NO: 1823 - protein, 18 aa, synthetic construct
  REGION 1..18: note = Synthetic Peptide
ERETKTPECPSHTQPLGV

SEQ ID NO: 1824 - protein, 18 aa, synthetic construct
  REGION 1..18: note = Synthetic Peptide
RETKTPECPSHTQPLGVY

SEQ ID NO: 1825 - protein, 18 aa, synthetic construct
  REGION 1..18: note = Synthetic Peptide
ETKTPECPSHTQPLGVYL

SEQ ID NO: 1826 - protein, 18 aa, synthetic construct
  REGION 1..18: note = Synthetic Peptide
TKTPECPSHTQPLGVYLL

SEQ ID NO: 1827 - protein, 18 aa, synthetic construct
  REGION 1..18: note = Synthetic Peptide
KTPECPSHTQPLGVYLLT

SEQ ID NO: 1828 - protein, 18 aa, synthetic construct
  REGION 1..18: note = Synthetic Peptide
TPECPSHTQPLGVYLLTP

SEQ ID NO: 1829 - protein, 17 aa, synthetic construct
  REGION 1..17: note = Synthetic Peptide
RWPESPKAQASSVPTAQ

SEQ ID NO: 1830 - protein, 17 aa, synthetic construct
  REGION 1..17: note = Synthetic Peptide
WPESPKAQASSVPTAQP

SEQ ID NO: 1831 - protein, 17 aa, synthetic construct
  REGION 1..17: note = Synthetic Peptide
PESPKAQASSVPTAQPQ

SEQ ID NO: 1832 - protein, 17 aa, synthetic construct
  REGION 1..17: note = Synthetic Peptide
ESPKAQASSVPTAQPQA

SEQ ID NO: 1833 - protein, 17 aa, synthetic construct
  REGION 1..17: note = Synthetic Peptide
SPKAQASSVPTAQPQAE

SEQ ID NO: 1834 - protein, 17 aa, synthetic construct
  REGION 1..17: note = Synthetic Peptide
PKAQASSVPTAQPQAEG

SEQ ID NO: 1835 - protein, 17 aa, synthetic construct
  REGION 1..17: note = Synthetic Peptide
KAQASSVPTAQPQAEGS

SEQ ID NO: 1836 - protein, 17 aa, synthetic construct
  REGION 1..17: note = Synthetic Peptide
AQASSVPTAQPQAEGSL

SEQ ID NO: 1837 - protein, 17 aa, synthetic construct
  REGION 1..17: note = Synthetic Peptide
QASSVPTAQPQAEGSLA

SEQ ID NO: 1838 - protein, 17 aa, synthetic construct
  REGION 1..17: note = Synthetic Peptide
ASSVPTAQPQAEGSLAK

SEQ ID NO: 1839 - protein, 17 aa, synthetic construct
  REGION 1..17: note = Synthetic Peptide
SSVPTAQPQAEGSLAKA

SEQ ID NO: 1840 - protein, 17 aa, synthetic construct
  REGION 1..17: note = Synthetic Peptide
SVPTAQPQAEGSLAKAT

SEQ ID NO: 1841 - protein, 17 aa, synthetic construct
  REGION 1..17: note = Synthetic Peptide
VPTAQPQAEGSLAKATT

SEQ ID NO: 1842 - protein, 17 aa, synthetic construct
  REGION 1..17: note = Synthetic Peptide
PTAQPQAEGSLAKATTA

SEQ ID NO: 1843 - protein, 17 aa, synthetic construct
  REGION 1..17: note = Synthetic Peptide
TAQPQAEGSLAKATTAP

SEQ ID NO: 1844 - protein, 17 aa, synthetic construct
  REGION 1..17: note = Synthetic Peptide
AQPQAEGSLAKATTAPA

SEQ ID NO: 1845 - protein, 17 aa, synthetic construct
  REGION 1..17: note = Synthetic Peptide
QPQAEGSLAKATTAPAT

SEQ ID NO: 1846 - protein, 17 aa, synthetic construct
  REGION 1..17: note = Synthetic Peptide
PQAEGSLAKATTAPATT

SEQ ID NO: 1847 - protein, 17 aa, synthetic construct
  REGION 1..17: note = Synthetic Peptide
QAEGSLAKATTAPATTR

SEQ ID NO: 1848 - protein, 17 aa, synthetic construct
  REGION 1..17: note = Synthetic Peptide
AEGSLAKATTAPATTRN

SEQ ID NO: 1849 - protein, 17 aa, synthetic construct
  REGION 1..17: note = Synthetic Peptide
EGSLAKATTAPATTRNT

SEQ ID NO: 1850 - protein, 17 aa, synthetic construct
  REGION 1..17: note = Synthetic Peptide
GSLAKATTAPATTRNTG

SEQ ID NO: 1851 - protein, 17 aa, synthetic construct
  REGION 1..17: note = Synthetic Peptide
SLAKATTAPATTRNTGR

SEQ ID NO: 1852 - protein, 17 aa, synthetic construct
  REGION 1..17: note = Synthetic Peptide
LAKATTAPATTRNTGRG

SEQ ID NO: 1853 - protein, 17 aa, synthetic construct
  REGION 1..17: note = Synthetic Peptide
AKATTAPATTRNTGRGG

SEQ ID NO: 1854 - protein, 17 aa, synthetic construct
  REGION 1..17: note = Synthetic Peptide
KATTAPATTRNTGRGGE

SEQ ID NO: 1855 - protein, 17 aa, synthetic construct
  REGION 1..17: note = Synthetic Peptide
ATTAPATTRNTGRGGEE

SEQ ID NO: 1856 - protein, 17 aa, synthetic construct
  REGION 1..17: note = Synthetic Peptide
TTAPATTRNTGRGGEEK

SEQ ID NO: 1857 - protein, 17 aa, synthetic construct
  REGION 1..17: note = Synthetic Peptide
TAPATTRNTGRGGEEKK

SEQ ID NO: 1858 - protein, 17 aa, synthetic construct
  REGION 1..17: note = Synthetic Peptide
APATTRNTGRGGEEKKK

SEQ ID NO: 1859 - protein, 17 aa, synthetic construct
  REGION 1..17: note = Synthetic Peptide
PATTRNTGRGGEEKKKE

SEQ ID NO: 1860 - protein, 17 aa, synthetic construct
  REGION 1..17: note = Synthetic Peptide
ATTRNTGRGGEEKKKEK

SEQ ID NO: 1861 - protein, 17 aa, synthetic construct
  REGION 1..17: note = Synthetic Peptide
TTRNTGRGGEEKKKEKE

SEQ ID NO: 1862 - protein, 17 aa, synthetic construct
  REGION 1..17: note = Synthetic Peptide
TRNTGRGGEEKKKEKEK

SEQ ID NO: 1863 - protein, 17 aa, synthetic construct
  REGION 1..17: note = Synthetic Peptide
RNTGRGGEEKKKEKEKE

SEQ ID NO: 1864 - protein, 17 aa, synthetic construct
  REGION 1..17: note = Synthetic Peptide
NTGRGGEEKKKEKEKEE

SEQ ID NO: 1865 - protein, 17 aa, synthetic construct
  REGION 1..17: note = Synthetic Peptide
TGRGGEEKKKEKEKEEQ

SEQ ID NO: 1866 - protein, 17 aa, synthetic construct
  REGION 1..17: note = Synthetic Peptide
GRGGEEKKKEKEKEEQE

SEQ ID NO: 1867 - protein, 17 aa, synthetic construct
  REGION 1..17: note = Synthetic Peptide
RGGEEKKKEKEKEEQEE

SEQ ID NO: 1868 - protein, 17 aa, synthetic construct
  REGION 1..17: note = Synthetic Peptide
GGEEKKKEKEKEEQEER

SEQ ID NO: 1869 - protein, 17 aa, synthetic construct
  REGION 1..17: note = Synthetic Peptide
GEEKKKEKEKEEQEERE

SEQ ID NO: 1870 - protein, 17 aa, synthetic construct
  REGION 1..17: note = Synthetic Peptide
EEKKKEKEKEEQEERET

SEQ ID NO: 1871 - protein, 17 aa, synthetic construct
  REGION 1..17: note = Synthetic Peptide
EKKKEKEKEEQEERETK

SEQ ID NO: 1872 - protein, 17 aa, synthetic construct
  REGION 1..17: note = Synthetic Peptide
KKKEKEKEEQEERETKT

SEQ ID NO: 1873 - protein, 17 aa, synthetic construct
  REGION 1..17: note = Synthetic Peptide
KKEKEKEEQEERETKTP

SEQ ID NO: 1874 - protein, 17 aa, synthetic construct
  REGION 1..17: note = Synthetic Peptide
KEKEKEEQEERETKTPE

SEQ ID NO: 1875 - protein, 17 aa, synthetic construct
  REGION 1..17: note = Synthetic Peptide
EKEKEEQEERETKTPEC

SEQ ID NO: 1876 - protein, 17 aa, synthetic construct
  REGION 1..17: note = Synthetic Peptide
KEKEEQEERETKTPECP

SEQ ID NO: 1877 - protein, 17 aa, synthetic construct
  REGION 1..17: note = Synthetic Peptide
EKEEQEERETKTPECPS

SEQ ID NO: 1878 - protein, 17 aa, synthetic construct
  REGION 1..17: note = Synthetic Peptide
KEEQEERETKTPECPSH

SEQ ID NO: 1879 - protein, 17 aa, synthetic construct
  REGION 1..17: note = Synthetic Peptide
EEQEERETKTPECPSHT

SEQ ID NO: 1880 - protein, 17 aa, synthetic construct
  REGION 1..17: note = Synthetic Peptide
EQEERETKTPECPSHTQ

SEQ ID NO: 1881 - protein, 17 aa, synthetic construct
  REGION 1..17: note = Synthetic Peptide
QEERETKTPECPSHTQP

SEQ ID NO: 1882 - protein, 17 aa, synthetic construct
  REGION 1..17: note = Synthetic Peptide
EERETKTPECPSHTQPL

SEQ ID NO: 1883 - protein, 17 aa, synthetic construct
  REGION 1..17: note = Synthetic Peptide
ERETKTPECPSHTQPLG

SEQ ID NO: 1884 - protein, 17 aa, synthetic construct
  REGION 1..17: note = Synthetic Peptide
RETKTPECPSHTQPLGV

SEQ ID NO: 1885 - protein, 17 aa, synthetic construct
  REGION 1..17: note = Synthetic Peptide
ETKTPECPSHTQPLGVY

SEQ ID NO: 1886 - protein, 17 aa, synthetic construct
  REGION 1..17: note = Synthetic Peptide
TKTPECPSHTQPLGVYL

SEQ ID NO: 1887 - protein, 17 aa, synthetic construct
  REGION 1..17: note = Synthetic Peptide
KTPECPSHTQPLGVYLL

SEQ ID NO: 1888 - protein, 17 aa, synthetic construct
  REGION 1..17: note = Synthetic Peptide
TPECPSHTQPLGVYLLT

SEQ ID NO: 1889 - protein, 17 aa, synthetic construct
  REGION 1..17: note = Synthetic Peptide
PECPSHTQPLGVYLLTP

SEQ ID NO: 1890 - protein, 16 aa, synthetic construct
  REGION 1..16: note = Synthetic Peptide
RWPESPKAQASSVPTA

SEQ ID NO: 1891 - protein, 16 aa, synthetic construct
  REGION 1..16: note = Synthetic Peptide
WPESPKAQASSVPTAQ

SEQ ID NO: 1892 - protein, 16 aa, synthetic construct
  REGION 1..16: note = Synthetic Peptide
PESPKAQASSVPTAQP

SEQ ID NO: 1893 - protein, 16 aa, synthetic construct
  REGION 1..16: note = Synthetic Peptide
ESPKAQASSVPTAQPQ

SEQ ID NO: 1894 - protein, 16 aa, synthetic construct
  REGION 1..16: note = Synthetic Peptide
SPKAQASSVPTAQPQA

SEQ ID NO: 1895 - protein, 16 aa, synthetic construct
  REGION 1..16: note = Synthetic Peptide
PKAQASSVPTAQPQAE

SEQ ID NO: 1896 - protein, 16 aa, synthetic construct
  REGION 1..16: note = Synthetic Peptide
KAQASSVPTAQPQAEG

SEQ ID NO: 1897 - protein, 16 aa, synthetic construct
  REGION 1..16: note = Synthetic Peptide
AQASSVPTAQPQAEGS

SEQ ID NO: 1898 - protein, 16 aa, synthetic construct
  REGION 1..16: note = Synthetic Peptide
QASSVPTAQPQAEGSL

SEQ ID NO: 1899 - protein, 16 aa, synthetic construct
  REGION 1..16: note = Synthetic Peptide
ASSVPTAQPQAEGSLA

SEQ ID NO: 1900 - protein, 16 aa, synthetic construct
  REGION 1..16: note = Synthetic Peptide
SSVPTAQPQAEGSLAK

SEQ ID NO: 1901 - protein, 16 aa, synthetic construct
  REGION 1..16: note = Synthetic Peptide
SVPTAQPQAEGSLAKA

SEQ ID NO: 1902 - protein, 16 aa, synthetic construct
  REGION 1..16: note = Synthetic Peptide
VPTAQPQAEGSLAKAT

SEQ ID NO: 1903 - protein, 16 aa, synthetic construct
  REGION 1..16: note = Synthetic Peptide
PTAQPQAEGSLAKATT

SEQ ID NO: 1904 - protein, 16 aa, synthetic construct
  REGION 1..16: note = Synthetic Peptide
TAQPQAEGSLAKATTA

SEQ ID NO: 1905 - protein, 16 aa, synthetic construct
  REGION 1..16: note = Synthetic Peptide
AQPQAEGSLAKATTAP

SEQ ID NO: 1906 - protein, 16 aa, synthetic construct
  REGION 1..16: note = Synthetic Peptide
QPQAEGSLAKATTAPA

SEQ ID NO: 1907 - protein, 16 aa, synthetic construct
  REGION 1..16: note = Synthetic Peptide
PQAEGSLAKATTAPAT

SEQ ID NO: 1908 - protein, 16 aa, synthetic construct
  REGION 1..16: note = Synthetic Peptide
QAEGSLAKATTAPATT

SEQ ID NO: 1909 - protein, 16 aa, synthetic construct
  REGION 1..16: note = Synthetic Peptide
AEGSLAKATTAPATTR

SEQ ID NO: 1910 - protein, 16 aa, synthetic construct
  REGION 1..16: note = Synthetic Peptide
EGSLAKATTAPATTRN

SEQ ID NO: 1911 - protein, 16 aa, synthetic construct
  REGION 1..16: note = Synthetic Peptide
GSLAKATTAPATTRNT

SEQ ID NO: 1912 - protein, 16 aa, synthetic construct
  REGION 1..16: note = Synthetic Peptide
SLAKATTAPATTRNTG

SEQ ID NO: 1913 - protein, 16 aa, synthetic construct
  REGION 1..16: note = Synthetic Peptide
LAKATTAPATTRNTGR

SEQ ID NO: 1914 - protein, 16 aa, synthetic construct
  REGION 1..16: note = Synthetic Peptide
AKATTAPATTRNTGRG

SEQ ID NO: 1915 - protein, 16 aa, synthetic construct
  REGION 1..16: note = Synthetic Peptide
KATTAPATTRNTGRGG

SEQ ID NO: 1916 - protein, 16 aa, synthetic construct
  REGION 1..16: note = Synthetic Peptide
ATTAPATTRNTGRGGE

SEQ ID NO: 1917 - protein, 16 aa, synthetic construct
  REGION 1..16: note = Synthetic Peptide
TTAPATTRNTGRGGEE

SEQ ID NO: 1918 - protein, 16 aa, synthetic construct
  REGION 1..16: note = Synthetic Peptide
TAPATTRNTGRGGEEK

SEQ ID NO: 1919 - protein, 16 aa, synthetic construct
  REGION 1..16: note = Synthetic Peptide
APATTRNTGRGGEEKK

SEQ ID NO: 1920 - protein, 16 aa, synthetic construct
  REGION 1..16: note = Synthetic Peptide
PATTRNTGRGGEEKKK

SEQ ID NO: 1921 - protein, 16 aa, synthetic construct
  REGION 1..16: note = Synthetic Peptide
ATTRNTGRGGEEKKKE

SEQ ID NO: 1922 - protein, 16 aa, synthetic construct
  REGION 1..16: note = Synthetic Peptide
TTRNTGRGGEEKKKEK

SEQ ID NO: 1923 - protein, 16 aa, synthetic construct
  REGION 1..16: note = Synthetic Peptide
TRNTGRGGEEKKKEKE

SEQ ID NO: 1924 - protein, 16 aa, synthetic construct
  REGION 1..16: note = Synthetic Peptide
RNTGRGGEEKKKEKEK

SEQ ID NO: 1925 - protein, 16 aa, synthetic construct
  REGION 1..16: note = Synthetic Peptide
NTGRGGEEKKKEKEKE

SEQ ID NO: 1926 - protein, 16 aa, synthetic construct
  REGION 1..16: note = Synthetic Peptide
TGRGGEEKKKEKEKEE

SEQ ID NO: 1927 - protein, 16 aa, synthetic construct
  REGION 1..16: note = Synthetic Peptide
GRGGEEKKKEKEKEEQ

SEQ ID NO: 1928 - protein, 16 aa, synthetic construct
  REGION 1..16: note = Synthetic Peptide
RGGEEKKKEKEKEEQE

SEQ ID NO: 1929 - protein, 16 aa, synthetic construct
  REGION 1..16: note = Synthetic Peptide
GGEEKKKEKEKEEQEE

SEQ ID NO: 1930 - protein, 16 aa, synthetic construct
  REGION 1..16: note = Synthetic Peptide
GEEKKKEKEKEEQEER

SEQ ID NO: 1931 - protein, 16 aa, synthetic construct
  REGION 1..16: note = Synthetic Peptide
EEKKKEKEKEEQEERE

SEQ ID NO: 1932 - protein, 16 aa, synthetic construct
  REGION 1..16: note = Synthetic Peptide
EKKKEKEKEEQEERET

SEQ ID NO: 1933 - protein, 16 aa, synthetic construct
  REGION 1..16: note = Synthetic Peptide
KKKEKEKEEQEERETK

SEQ ID NO: 1934 - protein, 16 aa, synthetic construct
  REGION 1..16: note = Synthetic Peptide
KKEKEKEEQEERETKT

SEQ ID NO: 1935 - protein, 16 aa, synthetic construct
  REGION 1..16: note = Synthetic Peptide
KEKEKEEQEERETKTP

SEQ ID NO: 1936 - protein, 16 aa, synthetic construct
  REGION 1..16: note = Synthetic Peptide
EKEKEEQEERETKTPE

SEQ ID NO: 1937 - protein, 16 aa, synthetic construct
  REGION 1..16: note = Synthetic Peptide
KEKEEQEERETKTPEC

SEQ ID NO: 1938 - protein, 16 aa, synthetic construct
  REGION 1..16: note = Synthetic Peptide
EKEEQEERETKTPECP

SEQ ID NO: 1939 - protein, 16 aa, synthetic construct
  REGION 1..16: note = Synthetic Peptide
KEEQEERETKTPECPS

SEQ ID NO: 1940 - protein, 16 aa, synthetic construct
  REGION 1..16: note = Synthetic Peptide
EEQEERETKTPECPSH

SEQ ID NO: 1941 - protein, 16 aa, synthetic construct
  REGION 1..16: note = Synthetic Peptide
EQEERETKTPECPSHT

SEQ ID NO: 1942 - protein, 16 aa, synthetic construct
  REGION 1..16: note = Synthetic Peptide
QEERETKTPECPSHTQ

SEQ ID NO: 1943 - protein, 16 aa, synthetic construct
  REGION 1..16: note = Synthetic Peptide
EERETKTPECPSHTQP

SEQ ID NO: 1944 - protein, 16 aa, synthetic construct
  REGION 1..16: note = Synthetic Peptide
ERETKTPECPSHTQPL

SEQ ID NO: 1945 - protein, 16 aa, synthetic construct
  REGION 1..16: note = Synthetic Peptide
RETKTPECPSHTQPLG

SEQ ID NO: 1946 - protein, 16 aa, synthetic construct
  REGION 1..16: note = Synthetic Peptide
ETKTPECPSHTQPLGV

SEQ ID NO: 1947 - protein, 16 aa, synthetic construct
  REGION 1..16: note = Synthetic Peptide
TKTPECPSHTQPLGVY

SEQ ID NO: 1948 - protein, 16 aa, synthetic construct
  REGION 1..16: note = Synthetic Peptide
KTPECPSHTQPLGVYL

SEQ ID NO: 1949 - protein, 16 aa, synthetic construct
  REGION 1..16: note = Synthetic Peptide
TPECPSHTQPLGVYLL

SEQ ID NO: 1950 - protein, 16 aa, synthetic construct
  REGION 1..16: note = Synthetic Peptide
PECPSHTQPLGVYLLT

SEQ ID NO: 1951 - protein, 16 aa, synthetic construct
  REGION 1..16: note = Synthetic Peptide
ECPSHTQPLGVYLLTP

SEQ ID NO: 1952 - protein, 15 aa, synthetic construct
  REGION 1..15: note = Synthetic Peptide
RWPESPKAQASSVPT

SEQ ID NO: 1953 - protein, 15 aa, synthetic construct
  REGION 1..15: note = Synthetic Peptide
WPESPKAQASSVPTA

SEQ ID NO: 1954 - protein, 15 aa, synthetic construct
  REGION 1..15: note = Synthetic Peptide
PESPKAQASSVPTAQ

SEQ ID NO: 1955 - protein, 15 aa, synthetic construct
  REGION 1..15: note = Synthetic Peptide
ESPKAQASSVPTAQP

SEQ ID NO: 1956 - protein, 15 aa, synthetic construct
  REGION 1..15: note = Synthetic Peptide
SPKAQASSVPTAQPQ

SEQ ID NO: 1957 - protein, 15 aa, synthetic construct
  REGION 1..15: note = Synthetic Peptide
PKAQASSVPTAQPQA

SEQ ID NO: 1958 - protein, 15 aa, synthetic construct
  REGION 1..15: note = Synthetic Peptide
KAQASSVPTAQPQAE

SEQ ID NO: 1959 - protein, 15 aa, synthetic construct
  REGION 1..15: note = Synthetic Peptide
AQASSVPTAQPQAEG

SEQ ID NO: 1960 - protein, 15 aa, synthetic construct
  REGION 1..15: note = Synthetic Peptide
QASSVPTAQPQAEGS

SEQ ID NO: 1961 - protein, 15 aa, synthetic construct
  REGION 1..15: note = Synthetic Peptide
ASSVPTAQPQAEGSL

SEQ ID NO: 1962 - protein, 15 aa, synthetic construct
  REGION 1..15: note = Synthetic Peptide
SSVPTAQPQAEGSLA

SEQ ID NO: 1963 - protein, 15 aa, synthetic construct
  REGION 1..15: note = Synthetic Peptide
SVPTAQPQAEGSLAK

SEQ ID NO: 1964 - protein, 15 aa, synthetic construct
  REGION 1..15: note = Synthetic Peptide
VPTAQPQAEGSLAKA

SEQ ID NO: 1965 - protein, 15 aa, synthetic construct
  REGION 1..15: note = Synthetic Peptide
PTAQPQAEGSLAKAT

SEQ ID NO: 1966 - protein, 15 aa, synthetic construct
  REGION 1..15: note = Synthetic Peptide
TAQPQAEGSLAKATT

SEQ ID NO: 1967 - protein, 15 aa, synthetic construct
  REGION 1..15: note = Synthetic Peptide
AQPQAEGSLAKATTA

SEQ ID NO: 1968 - protein, 15 aa, synthetic construct
  REGION 1..15: note = Synthetic Peptide
QPQAEGSLAKATTAP

SEQ ID NO: 1969 - protein, 15 aa, synthetic construct
  REGION 1..15: note = Synthetic Peptide
PQAEGSLAKATTAPA

SEQ ID NO: 1970 - protein, 15 aa, synthetic construct
  REGION 1..15: note = Synthetic Peptide
QAEGSLAKATTAPAT

SEQ ID NO: 1971 - protein, 15 aa, synthetic construct
  REGION 1..15: note = Synthetic Peptide
AEGSLAKATTAPATT

SEQ ID NO: 1972 - protein, 15 aa, synthetic construct
  REGION 1..15: note = Synthetic Peptide
EGSLAKATTAPATTR

SEQ ID NO: 1973 - protein, 15 aa, synthetic construct
  REGION 1..15: note = Synthetic Peptide
GSLAKATTAPATTRN

SEQ ID NO: 1974 - protein, 15 aa, synthetic construct
  REGION 1..15: note = Synthetic Peptide
SLAKATTAPATTRNT

SEQ ID NO: 1975 - protein, 15 aa, synthetic construct
  REGION 1..15: note = Synthetic Peptide
LAKATTAPATTRNTG

SEQ ID NO: 1976 - protein, 15 aa, synthetic construct
  REGION 1..15: note = Synthetic Peptide
AKATTAPATTRNTGR

SEQ ID NO: 1977 - protein, 15 aa, synthetic construct
  REGION 1..15: note = Synthetic Peptide
KATTAPATTRNTGRG

SEQ ID NO: 1978 - protein, 15 aa, synthetic construct
  REGION 1..15: note = Synthetic Peptide
ATTAPATTRNTGRGG

SEQ ID NO: 1979 - protein, 15 aa, synthetic construct
  REGION 1..15: note = Synthetic Peptide
TTAPATTRNTGRGGE

SEQ ID NO: 1980 - protein, 15 aa, synthetic construct
  REGION 1..15: note = Synthetic Peptide
TAPATTRNTGRGGEE

SEQ ID NO: 1981 - protein, 15 aa, synthetic construct
  REGION 1..15: note = Synthetic Peptide
APATTRNTGRGGEEK

SEQ ID NO: 1982 - protein, 15 aa, synthetic construct
  REGION 1..15: note = Synthetic Peptide
PATTRNTGRGGEEKK

SEQ ID NO: 1983 - protein, 15 aa, synthetic construct
  REGION 1..15: note = Synthetic Peptide
ATTRNTGRGGEEKKK

SEQ ID NO: 1984 - protein, 15 aa, synthetic construct
  REGION 1..15: note = Synthetic Peptide
TTRNTGRGGEEKKKE

SEQ ID NO: 1985 - protein, 15 aa, synthetic construct
  REGION 1..15: note = Synthetic Peptide
TRNTGRGGEEKKKEK

SEQ ID NO: 1986 - protein, 15 aa, synthetic construct
  REGION 1..15: note = Synthetic Peptide
RNTGRGGEEKKKEKE

SEQ ID NO: 1987 - protein, 15 aa, synthetic construct
  REGION 1..15: note = Synthetic Peptide
NTGRGGEEKKKEKEK

SEQ ID NO: 1988 - protein, 15 aa, synthetic construct
  REGION 1..15: note = Synthetic Peptide
TGRGGEEKKKEKEKE

SEQ ID NO: 1989 - protein, 15 aa, synthetic construct
  REGION 1..15: note = Synthetic Peptide
GRGGEEKKKEKEKEE

SEQ ID NO: 1990 - protein, 15 aa, synthetic construct
  REGION 1..15: note = Synthetic Peptide
RGGEEKKKEKEKEEQ

SEQ ID NO: 1991 - protein, 15 aa, synthetic construct
  REGION 1..15: note = Synthetic Peptide
GGEEKKKEKEKEEQE

SEQ ID NO: 1992 - protein, 15 aa, synthetic construct
  REGION 1..15: note = Synthetic Peptide
GEEKKKEKEKEEQEE

SEQ ID NO: 1993 - protein, 15 aa, synthetic construct
  REGION 1..15: note = Synthetic Peptide
EEKKKEKEKEEQEER

SEQ ID NO: 1994 - protein, 15 aa, synthetic construct
  REGION 1..15: note = Synthetic Peptide
EKKKEKEKEEQEERE

SEQ ID NO: 1995 - protein, 15 aa, synthetic construct
  REGION 1..15: note = Synthetic Peptide
KKKEKEKEEQEERET

SEQ ID NO: 1996 - protein, 15 aa, synthetic construct
  REGION 1..15: note = Synthetic Peptide
KKEKEKEEQEERETK

SEQ ID NO: 1997 - protein, 15 aa, synthetic construct
  REGION 1..15: note = Synthetic Peptide
KEKEKEEQEERETKT

SEQ ID NO: 1998 - protein, 15 aa, synthetic construct
  REGION 1..15: note = Synthetic Peptide
EKEKEEQEERETKTP

SEQ ID NO: 1999 - protein, 15 aa, synthetic construct
  REGION 1..15: note = Synthetic Peptide
KEKEEQEERETKTPE

SEQ ID NO: 2000 - protein, 15 aa, synthetic construct
  REGION 1..15: note = Synthetic Peptide
EKEEQEERETKTPEC

SEQ ID NO: 2001 - protein, 15 aa, synthetic construct
  REGION 1..15: note = Synthetic Peptide
KEEQEERETKTPECP

SEQ ID NO: 2002 - protein, 15 aa, synthetic construct
  REGION 1..15: note = Synthetic Peptide
EEQEERETKTPECPS

SEQ ID NO: 2003 - protein, 15 aa, synthetic construct
  REGION 1..15: note = Synthetic Peptide
EQEERETKTPECPSH

SEQ ID NO: 2004 - protein, 15 aa, synthetic construct
  REGION 1..15: note = Synthetic Peptide
QEERETKTPECPSHT

SEQ ID NO: 2005 - protein, 15 aa, synthetic construct
  REGION 1..15: note = Synthetic Peptide
EERETKTPECPSHTQ

SEQ ID NO: 2006 - protein, 15 aa, synthetic construct
  REGION 1..15: note = Synthetic Peptide
ERETKTPECPSHTQP

SEQ ID NO: 2007 - protein, 15 aa, synthetic construct
  REGION 1..15: note = Synthetic Peptide
RETKTPECPSHTQPL

SEQ ID NO: 2008 - protein, 15 aa, synthetic construct
  REGION 1..15: note = Synthetic Peptide
ETKTPECPSHTQPLG

SEQ ID NO: 2009 - protein, 15 aa, synthetic construct
  REGION 1..15: note = Synthetic Peptide
TKTPECPSHTQPLGV

SEQ ID NO: 2010 - protein, 15 aa, synthetic construct
  REGION 1..15: note = Synthetic Peptide
KTPECPSHTQPLGVY

SEQ ID NO: 2011 - protein, 15 aa, synthetic construct
  REGION 1..15: note = Synthetic Peptide
TPECPSHTQPLGVYL

SEQ ID NO: 2012 - protein, 15 aa, synthetic construct
  REGION 1..15: note = Synthetic Peptide
PECPSHTQPLGVYLL

SEQ ID NO: 2013 - protein, 15 aa, synthetic construct
  REGION 1..15: note = Synthetic Peptide
ECPSHTQPLGVYLLT

SEQ ID NO: 2014 - protein, 15 aa, synthetic construct
  REGION 1..15: note = Synthetic Peptide
CPSHTQPLGVYLLTP

SEQ ID NO: 2015 - protein, 14 aa, synthetic construct
  REGION 1..14: note = Synthetic Peptide
RWPESPKAQASSVP

SEQ ID NO: 2016 - protein, 14 aa, synthetic construct
  REGION 1..14: note = Synthetic Peptide
WPESPKAQASSVPT

SEQ ID NO: 2017 - protein, 14 aa, synthetic construct
  REGION 1..14: note = Synthetic Peptide
PESPKAQASSVPTA

SEQ ID NO: 2018 - protein, 14 aa, synthetic construct
  REGION 1..14: note = Synthetic Peptide
ESPKAQASSVPTAQ

SEQ ID NO: 2019 - protein, 14 aa, synthetic construct
  REGION 1..14: note = Synthetic Peptide
SPKAQASSVPTAQP

SEQ ID NO: 2020 - protein, 14 aa, synthetic construct
  REGION 1..14: note = Synthetic Peptide
PKAQASSVPTAQPQ

SEQ ID NO: 2021 - protein, 14 aa, synthetic construct
  REGION 1..14: note = Synthetic Peptide
KAQASSVPTAQPQA

SEQ ID NO: 2022 - protein, 14 aa, synthetic construct
  REGION 1..14: note = Synthetic Peptide
AQASSVPTAQPQAE

SEQ ID NO: 2023 - protein, 14 aa, synthetic construct
  REGION 1..14: note = Synthetic Peptide
QASSVPTAQPQAEG

SEQ ID NO: 2024 - protein, 14 aa, synthetic construct
  REGION 1..14: note = Synthetic Peptide
ASSVPTAQPQAEGS

SEQ ID NO: 2025 - protein, 14 aa, synthetic construct
  REGION 1..14: note = Synthetic Peptide
SSVPTAQPQAEGSL

SEQ ID NO: 2026 - protein, 14 aa, synthetic construct
  REGION 1..14: note = Synthetic Peptide
SVPTAQPQAEGSLA

SEQ ID NO: 2027 - protein, 14 aa, synthetic construct
  REGION 1..14: note = Synthetic Peptide
VPTAQPQAEGSLAK

SEQ ID NO: 2028 - protein, 14 aa, synthetic construct
  REGION 1..14: note = Synthetic Peptide
PTAQPQAEGSLAKA

SEQ ID NO: 2029 - protein, 14 aa, synthetic construct
  REGION 1..14: note = Synthetic Peptide
TAQPQAEGSLAKAT

SEQ ID NO: 2030 - protein, 14 aa, synthetic construct
  REGION 1..14: note = Synthetic Peptide
AQPQAEGSLAKATT

SEQ ID NO: 2031 - protein, 14 aa, synthetic construct
  REGION 1..14: note = Synthetic Peptide
QPQAEGSLAKATTA

SEQ ID NO: 2032 - protein, 14 aa, synthetic construct
  REGION 1..14: note = Synthetic Peptide
PQAEGSLAKATTAP

SEQ ID NO: 2033 - protein, 14 aa, synthetic construct
  REGION 1..14: note = Synthetic Peptide
QAEGSLAKATTAPA

SEQ ID NO: 2034 - protein, 14 aa, synthetic construct
  REGION 1..14: note = Synthetic Peptide
AEGSLAKATTAPAT

SEQ ID NO: 2035 - protein, 14 aa, synthetic construct
  REGION 1..14: note = Synthetic Peptide
EGSLAKATTAPATT

SEQ ID NO: 2036 - protein, 14 aa, synthetic construct
  REGION 1..14: note = Synthetic Peptide
GSLAKATTAPATTR

SEQ ID NO: 2037 - protein, 14 aa, synthetic construct
  REGION 1..14: note = Synthetic Peptide
SLAKATTAPATTRN

SEQ ID NO: 2038 - protein, 14 aa, synthetic construct
  REGION 1..14: note = Synthetic Peptide
LAKATTAPATTRNT

SEQ ID NO: 2039 - protein, 14 aa, synthetic construct
  REGION 1..14: note = Synthetic Peptide
AKATTAPATTRNTG

SEQ ID NO: 2040 - protein, 14 aa, synthetic construct
  REGION 1..14: note = Synthetic Peptide
KATTAPATTRNTGR

SEQ ID NO: 2041 - protein, 14 aa, synthetic construct
  REGION 1..14: note = Synthetic Peptide
ATTAPATTRNTGRG

SEQ ID NO: 2042 - protein, 14 aa, synthetic construct
  REGION 1..14: note = Synthetic Peptide
TTAPATTRNTGRGG

SEQ ID NO: 2043 - protein, 14 aa, synthetic construct
  REGION 1..14: note = Synthetic Peptide
TAPATTRNTGRGGE

SEQ ID NO: 2044 - protein, 14 aa, synthetic construct
  REGION 1..14: note = Synthetic Peptide
APATTRNTGRGGEE

SEQ ID NO: 2045 - protein, 14 aa, synthetic construct
  REGION 1..14: note = Synthetic Peptide
PATTRNTGRGGEEK

SEQ ID NO: 2046 - protein, 14 aa, synthetic construct
  REGION 1..14: note = Synthetic Peptide
ATTRNTGRGGEEKK

SEQ ID NO: 2047 - protein, 14 aa, synthetic construct
  REGION 1..14: note = Synthetic Peptide
TTRNTGRGGEEKKK

SEQ ID NO: 2048 - protein, 14 aa, synthetic construct
  REGION 1..14: note = Synthetic Peptide
TRNTGRGGEEKKKE

SEQ ID NO: 2049 - protein, 14 aa, synthetic construct
  REGION 1..14: note = Synthetic Peptide
RNTGRGGEEKKKEK

SEQ ID NO: 2050 - protein, 14 aa, synthetic construct
  REGION 1..14: note = Synthetic Peptide
NTGRGGEEKKKEKE

SEQ ID NO: 2051 - protein, 14 aa, synthetic construct
  REGION 1..14: note = Synthetic Peptide
TGRGGEEKKKEKEK

SEQ ID NO: 2052 - protein, 14 aa, synthetic construct
  REGION 1..14: note = Synthetic Peptide
GRGGEEKKKEKEKE

SEQ ID NO: 2053 - protein, 14 aa, synthetic construct
  REGION 1..14: note = Synthetic Peptide
RGGEEKKKEKEKEE

SEQ ID NO: 2054 - protein, 14 aa, synthetic construct
  REGION 1..14: note = Synthetic Peptide
GGEEKKKEKEKEEQ

SEQ ID NO: 2055 - protein, 14 aa, synthetic construct
  REGION 1..14: note = Synthetic Peptide
GEEKKKEKEKEEQE

SEQ ID NO: 2056 - protein, 14 aa, synthetic construct
  REGION 1..14: note = Synthetic Peptide
EEKKKEKEKEEQEE

SEQ ID NO: 2057 - protein, 14 aa, synthetic construct
  REGION 1..14: note = Synthetic Peptide
EKKKEKEKEEQEER

SEQ ID NO: 2058 - protein, 14 aa, synthetic construct
  REGION 1..14: note = Synthetic Peptide
KKKEKEKEEQEERE

SEQ ID NO: 2059 - protein, 14 aa, synthetic construct
  REGION 1..14: note = Synthetic Peptide
KKEKEKEEQEERET

SEQ ID NO: 2060 - protein, 14 aa, synthetic construct
  REGION 1..14: note = Synthetic Peptide
KEKEKEEQEERETK

SEQ ID NO: 2061 - protein, 14 aa, synthetic construct
  REGION 1..14: note = Synthetic Peptide
EKEKEEQEERETKT

SEQ ID NO: 2062 - protein, 14 aa, synthetic construct
  REGION 1..14: note = Synthetic Peptide
KEKEEQEERETKTP

SEQ ID NO: 2063 - protein, 14 aa, synthetic construct
  REGION 1..14: note = Synthetic Peptide
EKEEQEERETKTPE

SEQ ID NO: 2064 - protein, 14 aa, synthetic construct
  REGION 1..14: note = Synthetic Peptide
KEEQEERETKTPEC

SEQ ID NO: 2065 - protein, 14 aa, synthetic construct
  REGION 1..14: note = Synthetic Peptide
EEQEERETKTPECP

SEQ ID NO: 2066 - protein, 14 aa, synthetic construct
  REGION 1..14: note = Synthetic Peptide
EQEERETKTPECPS

SEQ ID NO: 2067 - protein, 14 aa, synthetic construct
  REGION 1..14: note = Synthetic Peptide
QEERETKTPECPSH

SEQ ID NO: 2068 - protein, 14 aa, synthetic construct
  REGION 1..14: note = Synthetic Peptide
EERETKTPECPSHT

SEQ ID NO: 2069 - protein, 14 aa, synthetic construct
  REGION 1..14: note = Synthetic Peptide
ERETKTPECPSHTQ

SEQ ID NO: 2070 - protein, 14 aa, synthetic construct
  REGION 1..14: note = Synthetic Peptide
RETKTPECPSHTQP

SEQ ID NO: 2071 - protein, 14 aa, synthetic construct
  REGION 1..14: note = Synthetic Peptide
ETKTPECPSHTQPL

SEQ ID NO: 2072 - protein, 14 aa, synthetic construct
  REGION 1..14: note = Synthetic Peptide
TKTPECPSHTQPLG

SEQ ID NO: 2073 - protein, 14 aa, synthetic construct
  REGION 1..14: note = Synthetic Peptide
KTPECPSHTQPLGV

SEQ ID NO: 2074 - protein, 14 aa, synthetic construct
  REGION 1..14: note = Synthetic Peptide
TPECPSHTQPLGVY

SEQ ID NO: 2075 - protein, 14 aa, synthetic construct
  REGION 1..14: note = Synthetic Peptide
PECPSHTQPLGVYL

SEQ ID NO: 2076 - protein, 14 aa, synthetic construct
  REGION 1..14: note = Synthetic Peptide
ECPSHTQPLGVYLL

SEQ ID NO: 2077 - protein, 14 aa, synthetic construct
  REGION 1..14: note = Synthetic Peptide
CPSHTQPLGVYLLT

SEQ ID NO: 2078 - protein, 14 aa, synthetic construct
  REGION 1..14: note = Synthetic Peptide
PSHTQPLGVYLLTP

SEQ ID NO: 2079 - protein, 13 aa, synthetic construct
  REGION 1..13: note = Synthetic Peptide
RWPESPKAQASSV

SEQ ID NO: 2080 - protein, 13 aa, synthetic construct
  REGION 1..13: note = Synthetic Peptide
WPESPKAQASSVP

SEQ ID NO: 2081 - protein, 13 aa, synthetic construct
  REGION 1..13: note = Synthetic Peptide
PESPKAQASSVPT

SEQ ID NO: 2082 - protein, 13 aa, synthetic construct
  REGION 1..13: note = Synthetic Peptide
ESPKAQASSVPTA

SEQ ID NO: 2083 - protein, 13 aa, synthetic construct
  REGION 1..13: note = Synthetic Peptide
SPKAQASSVPTAQ

SEQ ID NO: 2084 - protein, 13 aa, synthetic construct
  REGION 1..13: note = Synthetic Peptide
PKAQASSVPTAQP

SEQ ID NO: 2085 - protein, 13 aa, synthetic construct
  REGION 1..13: note = Synthetic Peptide
KAQASSVPTAQPQ

SEQ ID NO: 2086 - protein, 13 aa, synthetic construct
  REGION 1..13: note = Synthetic Peptide
AQASSVPTAQPQA

SEQ ID NO: 2087 - protein, 13 aa, synthetic construct
  REGION 1..13: note = Synthetic Peptide
QASSVPTAQPQAE

SEQ ID NO: 2088 - protein, 13 aa, synthetic construct
  REGION 1..13: note = Synthetic Peptide
ASSVPTAQPQAEG

SEQ ID NO: 2089 - protein, 13 aa, synthetic construct
  REGION 1..13: note = Synthetic Peptide
SSVPTAQPQAEGS

SEQ ID NO: 2090 - protein, 13 aa, synthetic construct
  REGION 1..13: note = Synthetic Peptide
SVPTAQPQAEGSL

SEQ ID NO: 2091 - protein, 13 aa, synthetic construct
  REGION 1..13: note = Synthetic Peptide
VPTAQPQAEGSLA

SEQ ID NO: 2092 - protein, 13 aa, synthetic construct
  REGION 1..13: note = Synthetic Peptide
PTAQPQAEGSLAK

SEQ ID NO: 2093 - protein, 13 aa, synthetic construct
  REGION 1..13: note = Synthetic Peptide
TAQPQAEGSLAKA

SEQ ID NO: 2094 - protein, 13 aa, synthetic construct
  REGION 1..13: note = Synthetic Peptide
AQPQAEGSLAKAT

SEQ ID NO: 2095 - protein, 13 aa, synthetic construct
  REGION 1..13: note = Synthetic Peptide
QPQAEGSLAKATT

SEQ ID NO: 2096 - protein, 13 aa, synthetic construct
  REGION 1..13: note = Synthetic Peptide
PQAEGSLAKATTA

SEQ ID NO: 2097 - protein, 13 aa, synthetic construct
  REGION 1..13: note = Synthetic Peptide
QAEGSLAKATTAP

SEQ ID NO: 2098 - protein, 13 aa, synthetic construct
  REGION 1..13: note = Synthetic Peptide
AEGSLAKATTAPA

SEQ ID NO: 2099 - protein, 13 aa, synthetic construct
  REGION 1..13: note = Synthetic Peptide
EGSLAKATTAPAT

SEQ ID NO: 2100 - protein, 13 aa, synthetic construct
  REGION 1..13: note = Synthetic Peptide
GSLAKATTAPATT

SEQ ID NO: 2101 - protein, 13 aa, synthetic construct
  REGION 1..13: note = Synthetic Peptide
SLAKATTAPATTR

SEQ ID NO: 2102 - protein, 13 aa, synthetic construct
  REGION 1..13: note = Synthetic Peptide
LAKATTAPATTRN

SEQ ID NO: 2103 - protein, 13 aa, synthetic construct
  REGION 1..13: note = Synthetic Peptide
AKATTAPATTRNT

SEQ ID NO: 2104 - protein, 13 aa, synthetic construct
  REGION 1..13: note = Synthetic Peptide
KATTAPATTRNTG

SEQ ID NO: 2105 - protein, 13 aa, synthetic construct
  REGION 1..13: note = Synthetic Peptide
ATTAPATTRNTGR

SEQ ID NO: 2106 - protein, 13 aa, synthetic construct
  REGION 1..13: note = Synthetic Peptide
TTAPATTRNTGRG

SEQ ID NO: 2107 - protein, 13 aa, synthetic construct
  REGION 1..13: note = Synthetic Peptide
TAPATTRNTGRGG

SEQ ID NO: 2108 - protein, 13 aa, synthetic construct
  REGION 1..13: note = Synthetic Peptide
APATTRNTGRGGE

SEQ ID NO: 2109 - protein, 13 aa, synthetic construct
  REGION 1..13: note = Synthetic Peptide
PATTRNTGRGGEE

SEQ ID NO: 2110 - protein, 13 aa, synthetic construct
  REGION 1..13: note = Synthetic Peptide
ATTRNTGRGGEEK

SEQ ID NO: 2111 - protein, 13 aa, synthetic construct
  REGION 1..13: note = Synthetic Peptide
TTRNTGRGGEEKK

SEQ ID NO: 2112 - protein, 13 aa, synthetic construct
  REGION 1..13: note = Synthetic Peptide
TRNTGRGGEEKKK

SEQ ID NO: 2113 - protein, 13 aa, synthetic construct
  REGION 1..13: note = Synthetic Peptide
RNTGRGGEEKKKE

SEQ ID NO: 2114 - protein, 13 aa, synthetic construct
  REGION 1..13: note = Synthetic Peptide
NTGRGGEEKKKEK

SEQ ID NO: 2115 - protein, 13 aa, synthetic construct
  REGION 1..13: note = Synthetic Peptide
TGRGGEEKKKEKE

SEQ ID NO: 2116 - protein, 13 aa, synthetic construct
  REGION 1..13: note = Synthetic Peptide
GRGGEEKKKEKEK

SEQ ID NO: 2117 - protein, 13 aa, synthetic construct
  REGION 1..13: note = Synthetic Peptide
RGGEEKKKEKEKE

SEQ ID NO: 2118 - protein, 13 aa, synthetic construct
  REGION 1..13: note = Synthetic Peptide
GGEEKKKEKEKEE

SEQ ID NO: 2119 - protein, 13 aa, synthetic construct
  REGION 1..13: note = Synthetic Peptide
GEEKKKEKEKEEQ

SEQ ID NO: 2120 - protein, 13 aa, synthetic construct
  REGION 1..13: note = Synthetic Peptide
EEKKKEKEKEEQE

SEQ ID NO: 2121 - protein, 13 aa, synthetic construct
  REGION 1..13: note = Synthetic Peptide
EKKKEKEKEEQEE

SEQ ID NO: 2122 - protein, 13 aa, synthetic construct
  REGION 1..13: note = Synthetic Peptide
KKKEKEKEEQEER

SEQ ID NO: 2123 - protein, 13 aa, synthetic construct
  REGION 1..13: note = Synthetic Peptide
KKEKEKEEQEERE

SEQ ID NO: 2124 - protein, 13 aa, synthetic construct
  REGION 1..13: note = Synthetic Peptide
KEKEKEEQEERET

SEQ ID NO: 2125 - protein, 13 aa, synthetic construct
  REGION 1..13: note = Synthetic Peptide
EKEKEEQEERETK

SEQ ID NO: 2126 - protein, 13 aa, synthetic construct
  REGION 1..13: note = Synthetic Peptide
KEKEEQEERETKT

SEQ ID NO: 2127 - protein, 13 aa, synthetic construct
  REGION 1..13: note = Synthetic Peptide
EKEEQEERETKTP

SEQ ID NO: 2128 - protein, 13 aa, synthetic construct
  REGION 1..13: note = Synthetic Peptide
KEEQEERETKTPE

SEQ ID NO: 2129 - protein, 13 aa, synthetic construct
  REGION 1..13: note = Synthetic Peptide
EEQEERETKTPEC

SEQ ID NO: 2130 - protein, 13 aa, synthetic construct
  REGION 1..13: note = Synthetic Peptide
EQEERETKTPECP

SEQ ID NO: 2131 - protein, 13 aa, synthetic construct
  REGION 1..13: note = Synthetic Peptide
QEERETKTPECPS

SEQ ID NO: 2132 - protein, 13 aa, synthetic construct
  REGION 1..13: note = Synthetic Peptide
EERETKTPECPSH

SEQ ID NO: 2133 - protein, 13 aa, synthetic construct
  REGION 1..13: note = Synthetic Peptide
ERETKTPECPSHT

SEQ ID NO: 2134 - protein, 13 aa, synthetic construct
  REGION 1..13: note = Synthetic Peptide
RETKTPECPSHTQ

SEQ ID NO: 2135 - protein, 13 aa, synthetic construct
  REGION 1..13: note = Synthetic Peptide
ETKTPECPSHTQP

SEQ ID NO: 2136 - protein, 13 aa, synthetic construct
  REGION 1..13: note = Synthetic Peptide
TKTPECPSHTQPL

SEQ ID NO: 2137 - protein, 13 aa, synthetic construct
  REGION 1..13: note = Synthetic Peptide
KTPECPSHTQPLG

SEQ ID NO: 2138 - protein, 13 aa, synthetic construct
  REGION 1..13: note = Synthetic Peptide
TPECPSHTQPLGV

SEQ ID NO: 2139 - protein, 13 aa, synthetic construct
  REGION 1..13: note = Synthetic Peptide
PECPSHTQPLGVY

SEQ ID NO: 2140 - protein, 13 aa, synthetic construct
  REGION 1..13: note = Synthetic Peptide
ECPSHTQPLGVYL

SEQ ID NO: 2141 - protein, 13 aa, synthetic construct
  REGION 1..13: note = Synthetic Peptide
CPSHTQPLGVYLL

SEQ ID NO: 2142 - protein, 13 aa, synthetic construct
  REGION 1..13: note = Synthetic Peptide
PSHTQPLGVYLLT

SEQ ID NO: 2143 - protein, 13 aa, synthetic construct
  REGION 1..13: note = Synthetic Peptide
SHTQPLGVYLLTP

SEQ ID NO: 2144 - protein, 12 aa, synthetic construct
  REGION 1..12: note = Synthetic Peptide
RWPESPKAQASS

SEQ ID NO: 2145 - protein, 12 aa, synthetic construct
  REGION 1..12: note = Synthetic Peptide
WPESPKAQASSV

SEQ ID NO: 2146 - protein, 12 aa, synthetic construct
  REGION 1..12: note = Synthetic Peptide
PESPKAQASSVP

SEQ ID NO: 2147 - protein, 12 aa, synthetic construct
  REGION 1..12: note = Synthetic Peptide
ESPKAQASSVPT

SEQ ID NO: 2148 - protein, 12 aa, synthetic construct
  REGION 1..12: note = Synthetic Peptide
SPKAQASSVPTA

SEQ ID NO: 2149 - protein, 12 aa, synthetic construct
  REGION 1..12: note = Synthetic Peptide
PKAQASSVPTAQ

SEQ ID NO: 2150 - protein, 12 aa, synthetic construct
  REGION 1..12: note = Synthetic Peptide
KAQASSVPTAQP

SEQ ID NO: 2151 - protein, 12 aa, synthetic construct
  REGION 1..12: note = Synthetic Peptide
AQASSVPTAQPQ

SEQ ID NO: 2152 - protein, 12 aa, synthetic construct
  REGION 1..12: note = Synthetic Peptide
QASSVPTAQPQA

SEQ ID NO: 2153 - protein, 12 aa, synthetic construct
  REGION 1..12: note = Synthetic Peptide
ASSVPTAQPQAE

SEQ ID NO: 2154 - protein, 12 aa, synthetic construct
  REGION 1..12: note = Synthetic Peptide
SSVPTAQPQAEG

SEQ ID NO: 2155 - protein, 12 aa, synthetic construct
  REGION 1..12: note = Synthetic Peptide
SVPTAQPQAEGS

SEQ ID NO: 2156 - protein, 12 aa, synthetic construct
  REGION 1..12: note = Synthetic Peptide
VPTAQPQAEGSL

SEQ ID NO: 2157 - protein, 12 aa, synthetic construct
  REGION 1..12: note = Synthetic Peptide
PTAQPQAEGSLA

SEQ ID NO: 2158 - protein, 12 aa, synthetic construct
  REGION 1..12: note = Synthetic Peptide
TAQPQAEGSLAK

SEQ ID NO: 2159 - protein, 12 aa, synthetic construct
  REGION 1..12: note = Synthetic Peptide
AQPQAEGSLAKA

SEQ ID NO: 2160 - protein, 12 aa, synthetic construct
  REGION 1..12: note = Synthetic Peptide
QPQAEGSLAKAT

SEQ ID NO: 2161 - protein, 12 aa, synthetic construct
  REGION 1..12: note = Synthetic Peptide
PQAEGSLAKATT

SEQ ID NO: 2162 - protein, 12 aa, synthetic construct
  REGION 1..12: note = Synthetic Peptide
QAEGSLAKATTA

SEQ ID NO: 2163 - protein, 12 aa, synthetic construct
  REGION 1..12: note = Synthetic Peptide
AEGSLAKATTAP

SEQ ID NO: 2164 - protein, 12 aa, synthetic construct
  REGION 1..12: note = Synthetic Peptide
EGSLAKATTAPA

SEQ ID NO: 2165 - protein, 12 aa, synthetic construct
  REGION 1..12: note = Synthetic Peptide
GSLAKATTAPAT

SEQ ID NO: 2166 - protein, 12 aa, synthetic construct
  REGION 1..12: note = Synthetic Peptide
SLAKATTAPATT

SEQ ID NO: 2167 - protein, 12 aa, synthetic construct
  REGION 1..12: note = Synthetic Peptide
LAKATTAPATTR

SEQ ID NO: 2168 - protein, 12 aa, synthetic construct
  REGION 1..12: note = Synthetic Peptide
AKATTAPATTRN

SEQ ID NO: 2169 - protein, 12 aa, synthetic construct
  REGION 1..12: note = Synthetic Peptide
KATTAPATTRNT

SEQ ID NO: 2170 - protein, 12 aa, synthetic construct
  REGION 1..12: note = Synthetic Peptide
ATTAPATTRNTG

SEQ ID NO: 2171 - protein, 12 aa, synthetic construct
  REGION 1..12: note = Synthetic Peptide
TTAPATTRNTGR

SEQ ID NO: 2172 - protein, 12 aa, synthetic construct
  REGION 1..12: note = Synthetic Peptide
TAPATTRNTGRG

SEQ ID NO: 2173 - protein, 12 aa, synthetic construct
  REGION 1..12: note = Synthetic Peptide
APATTRNTGRGG

SEQ ID NO: 2174 - protein, 12 aa, synthetic construct
  REGION 1..12: note = Synthetic Peptide
PATTRNTGRGGE

SEQ ID NO: 2175 - protein, 12 aa, synthetic construct
  REGION 1..12: note = Synthetic Peptide
ATTRNTGRGGEE

SEQ ID NO: 2176 - protein, 12 aa, synthetic construct
  REGION 1..12: note = Synthetic Peptide
TTRNTGRGGEEK

SEQ ID NO: 2177 - protein, 12 aa, synthetic construct
  REGION 1..12: note = Synthetic Peptide
TRNTGRGGEEKK

SEQ ID NO: 2178 - protein, 12 aa, synthetic construct
  REGION 1..12: note = Synthetic Peptide
RNTGRGGEEKKK

SEQ ID NO: 2179 - protein, 12 aa, synthetic construct
  REGION 1..12: note = Synthetic Peptide
NTGRGGEEKKKE

SEQ ID NO: 2180 - protein, 12 aa, synthetic construct
  REGION 1..12: note = Synthetic Peptide
TGRGGEEKKKEK

SEQ ID NO: 2181 - protein, 12 aa, synthetic construct
  REGION 1..12: note = Synthetic Peptide
GRGGEEKKKEKE

SEQ ID NO: 2182 - protein, 12 aa, synthetic construct
  REGION 1..12: note = Synthetic Peptide
RGGEEKKKEKEK

SEQ ID NO: 2183 - protein, 12 aa, synthetic construct
  REGION 1..12: note = Synthetic Peptide
GGEEKKKEKEKE

SEQ ID NO: 2184 - protein, 12 aa, synthetic construct
  REGION 1..12: note = Synthetic Peptide
GEEKKKEKEKEE

SEQ ID NO: 2185 - protein, 12 aa, synthetic construct
  REGION 1..12: note = Synthetic Peptide
EEKKKEKEKEEQ

SEQ ID NO: 2186 - protein, 12 aa, synthetic construct
  REGION 1..12: note = Synthetic Peptide
EKKKEKEKEEQE

SEQ ID NO: 2187 - protein, 12 aa, synthetic construct
  REGION 1..12: note = Synthetic Peptide
KKKEKEKEEQEE

SEQ ID NO: 2188 - protein, 12 aa, synthetic construct
  REGION 1..12: note = Synthetic Peptide
KKEKEKEEQEER

SEQ ID NO: 2189 - protein, 12 aa, synthetic construct
  REGION 1..12: note = Synthetic Peptide
KEKEKEEQEERE

SEQ ID NO: 2190 - protein, 12 aa, synthetic construct
  REGION 1..12: note = Synthetic Peptide
EKEKEEQEERET

SEQ ID NO: 2191 - protein, 12 aa, synthetic construct
  REGION 1..12: note = Synthetic Peptide
KEKEEQEERETK

SEQ ID NO: 2192 - protein, 12 aa, synthetic construct
  REGION 1..12: note = Synthetic Peptide
EKEEQEERETKT

SEQ ID NO: 2193 - protein, 12 aa, synthetic construct
  REGION 1..12: note = Synthetic Peptide
KEEQEERETKTP

SEQ ID NO: 2194 - protein, 12 aa, synthetic construct
  REGION 1..12: note = Synthetic Peptide
EEQEERETKTPE

SEQ ID NO: 2195 - protein, 12 aa, synthetic construct
  REGION 1..12: note = Synthetic Peptide
EQEERETKTPEC

SEQ ID NO: 2196 - protein, 12 aa, synthetic construct
  REGION 1..12: note = Synthetic Peptide
QEERETKTPECP

SEQ ID NO: 2197 - protein, 12 aa, synthetic construct
  REGION 1..12: note = Synthetic Peptide
EERETKTPECPS

SEQ ID NO: 2198 - protein, 12 aa, synthetic construct
  REGION 1..12: note = Synthetic Peptide
ERETKTPECPSH

SEQ ID NO: 2199 - protein, 12 aa, synthetic construct
  REGION 1..12: note = Synthetic Peptide
RETKTPECPSHT

SEQ ID NO: 2200 - protein, 12 aa, synthetic construct
  REGION 1..12: note = Synthetic Peptide
ETKTPECPSHTQ

SEQ ID NO: 2201 - protein, 12 aa, synthetic construct
  REGION 1..12: note = Synthetic Peptide
TKTPECPSHTQP

SEQ ID NO: 2202 - protein, 12 aa, synthetic construct
  REGION 1..12: note = Synthetic Peptide
KTPECPSHTQPL

SEQ ID NO: 2203 - protein, 12 aa, synthetic construct
  REGION 1..12: note = Synthetic Peptide
TPECPSHTQPLG

SEQ ID NO: 2204 - protein, 12 aa, synthetic construct
  REGION 1..12: note = Synthetic Peptide
PECPSHTQPLGV

SEQ ID NO: 2205 - protein, 12 aa, synthetic construct
  REGION 1..12: note = Synthetic Peptide
ECPSHTQPLGVY

SEQ ID NO: 2206 - protein, 12 aa, synthetic construct
  REGION 1..12: note = Synthetic Peptide
CPSHTQPLGVYL

SEQ ID NO: 2207 - protein, 12 aa, synthetic construct
  REGION 1..12: note = Synthetic Peptide
PSHTQPLGVYLL

SEQ ID NO: 2208 - protein, 12 aa, synthetic construct
  REGION 1..12: note = Synthetic Peptide
SHTQPLGVYLLT

SEQ ID NO: 2209 - protein, 12 aa, synthetic construct
  REGION 1..12: note = Synthetic Peptide
HTQPLGVYLLTP

SEQ ID NO: 2210 - protein, 11 aa, synthetic construct
  REGION 1..11: note = Synthetic Peptide
RWPESPKAQAS

SEQ ID NO: 2211 - protein, 11 aa, synthetic construct
  REGION 1..11: note = Synthetic Peptide
WPESPKAQASS

SEQ ID NO: 2212 - protein, 11 aa, synthetic construct
  REGION 1..11: note = Synthetic Peptide
PESPKAQASSV

SEQ ID NO: 2213 - protein, 11 aa, synthetic construct
  REGION 1..11: note = Synthetic Peptide
ESPKAQASSVP

SEQ ID NO: 2214 - protein, 11 aa, synthetic construct
  REGION 1..11: note = Synthetic Peptide
SPKAQASSVPT

SEQ ID NO: 2215 - protein, 11 aa, synthetic construct
  REGION 1..11: note = Synthetic Peptide
PKAQASSVPTA

SEQ ID NO: 2216 - protein, 11 aa, synthetic construct
  REGION 1..11: note = Synthetic Peptide
KAQASSVPTAQ

SEQ ID NO: 2217 - protein, 11 aa, synthetic construct
  REGION 1..11: note = Synthetic Peptide
AQASSVPTAQP

SEQ ID NO: 2218 - protein, 11 aa, synthetic construct
  REGION 1..11: note = Synthetic Peptide
QASSVPTAQPQ

SEQ ID NO: 2219 - protein, 11 aa, synthetic construct
  REGION 1..11: note = Synthetic Peptide
ASSVPTAQPQA

SEQ ID NO: 2220 - protein, 11 aa, synthetic construct
  REGION 1..11: note = Synthetic Peptide
SSVPTAQPQAE

SEQ ID NO: 2221 - protein, 11 aa, synthetic construct
  REGION 1..11: note = Synthetic Peptide
SVPTAQPQAEG

SEQ ID NO: 2222 - protein, 11 aa, synthetic construct
  REGION 1..11: note = Synthetic Peptide
VPTAQPQAEGS

SEQ ID NO: 2223 - protein, 11 aa, synthetic construct
  REGION 1..11: note = Synthetic Peptide
PTAQPQAEGSL

SEQ ID NO: 2224 - protein, 11 aa, synthetic construct
  REGION 1..11: note = Synthetic Peptide
TAQPQAEGSLA

SEQ ID NO: 2225 - protein, 11 aa, synthetic construct
  REGION 1..11: note = Synthetic Peptide
AQPQAEGSLAK

SEQ ID NO: 2226 - protein, 11 aa, synthetic construct
  REGION 1..11: note = Synthetic Peptide
QPQAEGSLAKA

SEQ ID NO: 2227 - protein, 11 aa, synthetic construct
  REGION 1..11: note = Synthetic Peptide
PQAEGSLAKAT

SEQ ID NO: 2228 - protein, 11 aa, synthetic construct
  REGION 1..11: note = Synthetic Peptide
QAEGSLAKATT

SEQ ID NO: 2229 - protein, 11 aa, synthetic construct
  REGION 1..11: note = Synthetic Peptide
AEGSLAKATTA

SEQ ID NO: 2230 - protein, 11 aa, synthetic construct
  REGION 1..11: note = Synthetic Peptide
EGSLAKATTAP

SEQ ID NO: 2231 - protein, 11 aa, synthetic construct
  REGION 1..11: note = Synthetic Peptide
GSLAKATTAPA

SEQ ID NO: 2232 - protein, 11 aa, synthetic construct
  REGION 1..11: note = Synthetic Peptide
SLAKATTAPAT

SEQ ID NO: 2233 - protein, 11 aa, synthetic construct
  REGION 1..11: note = Synthetic Peptide
LAKATTAPATT

SEQ ID NO: 2234 - protein, 11 aa, synthetic construct
  REGION 1..11: note = Synthetic Peptide
AKATTAPATTR

SEQ ID NO: 2235 - protein, 11 aa, synthetic construct
  REGION 1..11: note = Synthetic Peptide
KATTAPATTRN

SEQ ID NO: 2236 - protein, 11 aa, synthetic construct
  REGION 1..11: note = Synthetic Peptide
ATTAPATTRNT

SEQ ID NO: 2237 - protein, 11 aa, synthetic construct
  REGION 1..11: note = Synthetic Peptide
TTAPATTRNTG

SEQ ID NO: 2238 - protein, 11 aa, synthetic construct
  REGION 1..11: note = Synthetic Peptide
TAPATTRNTGR

SEQ ID NO: 2239 - protein, 11 aa, synthetic construct
  REGION 1..11: note = Synthetic Peptide
APATTRNTGRG

SEQ ID NO: 2240 - protein, 11 aa, synthetic construct
  REGION 1..11: note = Synthetic Peptide
PATTRNTGRGG

SEQ ID NO: 2241 - protein, 11 aa, synthetic construct
  REGION 1..11: note = Synthetic Peptide
ATTRNTGRGGE

SEQ ID NO: 2242 - protein, 11 aa, synthetic construct
  REGION 1..11: note = Synthetic Peptide
TTRNTGRGGEE

SEQ ID NO: 2243 - protein, 11 aa, synthetic construct
  REGION 1..11: note = Synthetic Peptide
TRNTGRGGEEK

SEQ ID NO: 2244 - protein, 11 aa, synthetic construct
  REGION 1..11: note = Synthetic Peptide
RNTGRGGEEKK

SEQ ID NO: 2245 - protein, 11 aa, synthetic construct
  REGION 1..11: note = Synthetic Peptide
NTGRGGEEKKK

SEQ ID NO: 2246 - protein, 11 aa, synthetic construct
  REGION 1..11: note = Synthetic Peptide
TGRGGEEKKKE

SEQ ID NO: 2247 - protein, 11 aa, synthetic construct
  REGION 1..11: note = Synthetic Peptide
GRGGEEKKKEK

SEQ ID NO: 2248 - protein, 11 aa, synthetic construct
  REGION 1..11: note = Synthetic Peptide
RGGEEKKKEKE

SEQ ID NO: 2249 - protein, 11 aa, synthetic construct
  REGION 1..11: note = Synthetic Peptide
GGEEKKKEKEK

SEQ ID NO: 2250 - protein, 11 aa, synthetic construct
  REGION 1..11: note = Synthetic Peptide
GEEKKKEKEKE

SEQ ID NO: 2251 - protein, 11 aa, synthetic construct
  REGION 1..11: note = Synthetic Peptide
EEKKKEKEKEE

SEQ ID NO: 2252 - protein, 11 aa, synthetic construct
  REGION 1..11: note = Synthetic Peptide
EKKKEKEKEEQ

SEQ ID NO: 2253 - protein, 11 aa, synthetic construct
  REGION 1..11: note = Synthetic Peptide
KKKEKEKEEQE

SEQ ID NO: 2254 - protein, 11 aa, synthetic construct
  REGION 1..11: note = Synthetic Peptide
KKEKEKEEQEE

SEQ ID NO: 2255 - protein, 11 aa, synthetic construct
  REGION 1..11: note = Synthetic Peptide
KEKEKEEQEER

SEQ ID NO: 2256 - protein, 11 aa, synthetic construct
  REGION 1..11: note = Synthetic Peptide
EKEKEEQEERE

SEQ ID NO: 2257 - protein, 11 aa, synthetic construct
  REGION 1..11: note = Synthetic Peptide
KEKEEQEERET

SEQ ID NO: 2258 - protein, 11 aa, synthetic construct
  REGION 1..11: note = Synthetic Peptide
EKEEQEERETK

SEQ ID NO: 2259 - protein, 11 aa, synthetic construct
  REGION 1..11: note = Synthetic Peptide
KEEQEERETKT

SEQ ID NO: 2260 - protein, 11 aa, synthetic construct
  REGION 1..11: note = Synthetic Peptide
EEQEERETKTP

SEQ ID NO: 2261 - protein, 11 aa, synthetic construct
  REGION 1..11: note = Synthetic Peptide
EQEERETKTPE

SEQ ID NO: 2262 - protein, 11 aa, synthetic construct
  REGION 1..11: note = Synthetic Peptide
QEERETKTPEC

SEQ ID NO: 2263 - protein, 11 aa, synthetic construct
  REGION 1..11: note = Synthetic Peptide
EERETKTPECP

SEQ ID NO: 2264 - protein, 11 aa, synthetic construct
  REGION 1..11: note = Synthetic Peptide
ERETKTPECPS

SEQ ID NO: 2265 - protein, 11 aa, synthetic construct
  REGION 1..11: note = Synthetic Peptide
RETKTPECPSH

SEQ ID NO: 2266 - protein, 11 aa, synthetic construct
  REGION 1..11: note = Synthetic Peptide
ETKTPECPSHT

SEQ ID NO: 2267 - protein, 11 aa, synthetic construct
  REGION 1..11: note = Synthetic Peptide
TKTPECPSHTQ

SEQ ID NO: 2268 - protein, 11 aa, synthetic construct
  REGION 1..11: note = Synthetic Peptide
KTPECPSHTQP

SEQ ID NO: 2269 - protein, 11 aa, synthetic construct
  REGION 1..11: note = Synthetic Peptide
TPECPSHTQPL

SEQ ID NO: 2270 - protein, 11 aa, synthetic construct
  REGION 1..11: note = Synthetic Peptide
PECPSHTQPLG

SEQ ID NO: 2271 - protein, 11 aa, synthetic construct
  REGION 1..11: note = Synthetic Peptide
ECPSHTQPLGV

SEQ ID NO: 2272 - protein, 11 aa, synthetic construct
  REGION 1..11: note = Synthetic Peptide
CPSHTQPLGVY

SEQ ID NO: 2273 - protein, 11 aa, synthetic construct
  REGION 1..11: note = Synthetic Peptide
PSHTQPLGVYL

SEQ ID NO: 2274 - protein, 11 aa, synthetic construct
  REGION 1..11: note = Synthetic Peptide
SHTQPLGVYLL

SEQ ID NO: 2275 - protein, 11 aa, synthetic construct
  REGION 1..11: note = Synthetic Peptide
HTQPLGVYLLT

SEQ ID NO: 2276 - protein, 11 aa, synthetic construct
  REGION 1..11: note = Synthetic Peptide
TQPLGVYLLTP

SEQ ID NO: 2277 - protein, 10 aa, synthetic construct
  REGION 1..10: note = Synthetic Peptide
RWPESPKAQA

SEQ ID NO: 2278 - protein, 10 aa, synthetic construct
  REGION 1..10: note = Synthetic Peptide
WPESPKAQAS

SEQ ID NO: 2279 - protein, 10 aa, synthetic construct
  REGION 1..10: note = Synthetic Peptide
PESPKAQASS

SEQ ID NO: 2280 - protein, 10 aa, synthetic construct
  REGION 1..10: note = Synthetic Peptide
ESPKAQASSV

SEQ ID NO: 2281 - protein, 10 aa, synthetic construct
  REGION 1..10: note = Synthetic Peptide
SPKAQASSVP

SEQ ID NO: 2282 - protein, 10 aa, synthetic construct
  REGION 1..10: note = Synthetic Peptide
PKAQASSVPT

SEQ ID NO: 2283 - protein, 10 aa, synthetic construct
  REGION 1..10: note = Synthetic Peptide
KAQASSVPTA

SEQ ID NO: 2284 - protein, 10 aa, synthetic construct
  REGION 1..10: note = Synthetic Peptide
AQASSVPTAQ

SEQ ID NO: 2285 - protein, 10 aa, synthetic construct
  REGION 1..10: note = Synthetic Peptide
QASSVPTAQP

SEQ ID NO: 2286 - protein, 10 aa, synthetic construct
  REGION 1..10: note = Synthetic Peptide
ASSVPTAQPQ

SEQ ID NO: 2287 - protein, 10 aa, synthetic construct
  REGION 1..10: note = Synthetic Peptide
SSVPTAQPQA

SEQ ID NO: 2288 - protein, 10 aa, synthetic construct
  REGION 1..10: note = Synthetic Peptide
SVPTAQPQAE

SEQ ID NO: 2289 - protein, 10 aa, synthetic construct
  REGION 1..10: note = Synthetic Peptide
VPTAQPQAEG

SEQ ID NO: 2290 - protein, 10 aa, synthetic construct
  REGION 1..10: note = Synthetic Peptide
PTAQPQAEGS

SEQ ID NO: 2291 - protein, 10 aa, synthetic construct
  REGION 1..10: note = Synthetic Peptide
TAQPQAEGSL

SEQ ID NO: 2292 - protein, 10 aa, synthetic construct
  REGION 1..10: note = Synthetic Peptide
AQPQAEGSLA

SEQ ID NO: 2293 - protein, 10 aa, synthetic construct
  REGION 1..10: note = Synthetic Peptide
QPQAEGSLAK

SEQ ID NO: 2294 - protein, 10 aa, synthetic construct
  REGION 1..10: note = Synthetic Peptide
PQAEGSLAKA

SEQ ID NO: 2295 - protein, 10 aa, synthetic construct
  REGION 1..10: note = Synthetic Peptide
QAEGSLAKAT

SEQ ID NO: 2296 - protein, 10 aa, synthetic construct
  REGION 1..10: note = Synthetic Peptide
AEGSLAKATT

SEQ ID NO: 2297 - protein, 10 aa, synthetic construct
  REGION 1..10: note = Synthetic Peptide
EGSLAKATTA

SEQ ID NO: 2298 - protein, 10 aa, synthetic construct
  REGION 1..10: note = Synthetic Peptide
GSLAKATTAP

SEQ ID NO: 2299 - protein, 10 aa, synthetic construct
  REGION 1..10: note = Synthetic Peptide
SLAKATTAPA

SEQ ID NO: 2300 - protein, 10 aa, synthetic construct
  REGION 1..10: note = Synthetic Peptide
LAKATTAPAT

SEQ ID NO: 2301 - protein, 10 aa, synthetic construct
  REGION 1..10: note = Synthetic Peptide
AKATTAPATT

SEQ ID NO: 2302 - protein, 10 aa, synthetic construct
  REGION 1..10: note = Synthetic Peptide
KATTAPATTR

SEQ ID NO: 2303 - protein, 10 aa, synthetic construct
  REGION 1..10: note = Synthetic Peptide
ATTAPATTRN

SEQ ID NO: 2304 - protein, 10 aa, synthetic construct
  REGION 1..10: note = Synthetic Peptide
TTAPATTRNT

SEQ ID NO: 2305 - protein, 10 aa, synthetic construct
  REGION 1..10: note = Synthetic Peptide
TAPATTRNTG

SEQ ID NO: 2306 - protein, 10 aa, synthetic construct
  REGION 1..10: note = Synthetic Peptide
APATTRNTGR

SEQ ID NO: 2307 - protein, 10 aa, synthetic construct
  REGION 1..10: note = Synthetic Peptide
PATTRNTGRG

SEQ ID NO: 2308 - protein, 10 aa, synthetic construct
  REGION 1..10: note = Synthetic Peptide
ATTRNTGRGG

SEQ ID NO: 2309 - protein, 10 aa, synthetic construct
  REGION 1..10: note = Synthetic Peptide
TTRNTGRGGE

SEQ ID NO: 2310 - protein, 10 aa, synthetic construct
  REGION 1..10: note = Synthetic Peptide
TRNTGRGGEE

SEQ ID NO: 2311 - protein, 10 aa, synthetic construct
  REGION 1..10: note = Synthetic Peptide
RNTGRGGEEK

SEQ ID NO: 2312 - protein, 10 aa, synthetic construct
  REGION 1..10: note = Synthetic Peptide
NTGRGGEEKK

SEQ ID NO: 2313 - protein, 10 aa, synthetic construct
  REGION 1..10: note = Synthetic Peptide
TGRGGEEKKK

SEQ ID NO: 2314 - protein, 10 aa, synthetic construct
  REGION 1..10: note = Synthetic Peptide
GRGGEEKKKE

SEQ ID NO: 2315 - protein, 10 aa, synthetic construct
  REGION 1..10: note = Synthetic Peptide
RGGEEKKKEK

SEQ ID NO: 2316 - protein, 10 aa, synthetic construct
  REGION 1..10: note = Synthetic Peptide
GGEEKKKEKE

SEQ ID NO: 2317 - protein, 10 aa, synthetic construct
  REGION 1..10: note = Synthetic Peptide
GEEKKKEKEK

SEQ ID NO: 2318 - protein, 10 aa, synthetic construct
  REGION 1..10: note = Synthetic Peptide
EEKKKEKEKE

SEQ ID NO: 2319 - protein, 10 aa, synthetic construct
  REGION 1..10: note = Synthetic Peptide
EKKKEKEKEE

SEQ ID NO: 2320 - protein, 10 aa, synthetic construct
  REGION 1..10: note = Synthetic Peptide
KKKEKEKEEQ

SEQ ID NO: 2321 - protein, 10 aa, synthetic construct
  REGION 1..10: note = Synthetic Peptide
KKEKEKEEQE

SEQ ID NO: 2322 - protein, 10 aa, synthetic construct
  REGION 1..10: note = Synthetic Peptide
KEKEKEEQEE

SEQ ID NO: 2323 - protein, 10 aa, synthetic construct
  REGION 1..10: note = Synthetic Peptide
EKEKEEQEER

SEQ ID NO: 2324 - protein, 10 aa, synthetic construct
  REGION 1..10: note = Synthetic Peptide
KEKEEQEERE

SEQ ID NO: 2325 - protein, 10 aa, synthetic construct
  REGION 1..10: note = Synthetic Peptide
EKEEQEERET

SEQ ID NO: 2326 - protein, 10 aa, synthetic construct
  REGION 1..10: note = Synthetic Peptide
KEEQEERETK

SEQ ID NO: 2327 - protein, 10 aa, synthetic construct
  REGION 1..10: note = Synthetic Peptide
EEQEERETKT

SEQ ID NO: 2328 - protein, 10 aa, synthetic construct
  REGION 1..10: note = Synthetic Peptide
EQEERETKTP

SEQ ID NO: 2329 - protein, 10 aa, synthetic construct
  REGION 1..10: note = Synthetic Peptide
QEERETKTPE

SEQ ID NO: 2330 - protein, 10 aa, synthetic construct
  REGION 1..10: note = Synthetic Peptide
EERETKTPEC

SEQ ID NO: 2331 - protein, 10 aa, synthetic construct
  REGION 1..10: note = Synthetic Peptide
ERETKTPECP

SEQ ID NO: 2332 - protein, 10 aa, synthetic construct
  REGION 1..10: note = Synthetic Peptide
RETKTPECPS

SEQ ID NO: 2333 - protein, 10 aa, synthetic construct
  REGION 1..10: note = Synthetic Peptide
ETKTPECPSH

SEQ ID NO: 2334 - protein, 10 aa, synthetic construct
  REGION 1..10: note = Synthetic Peptide
TKTPECPSHT

SEQ ID NO: 2335 - protein, 10 aa, synthetic construct
  REGION 1..10: note = Synthetic Peptide
KTPECPSHTQ

SEQ ID NO: 2336 - protein, 10 aa, synthetic construct
  REGION 1..10: note = Synthetic Peptide
TPECPSHTQP

SEQ ID NO: 2337 - protein, 10 aa, synthetic construct
  REGION 1..10: note = Synthetic Peptide
PECPSHTQPL

SEQ ID NO: 2338 - protein, 10 aa, synthetic construct
  REGION 1..10: note = Synthetic Peptide
ECPSHTQPLG

SEQ ID NO: 2339 - protein, 10 aa, synthetic construct
  REGION 1..10: note = Synthetic Peptide
CPSHTQPLGV

SEQ ID NO: 2340 - protein, 10 aa, synthetic construct
  REGION 1..10: note = Synthetic Peptide
PSHTQPLGVY

SEQ ID NO: 2341 - protein, 10 aa, synthetic construct
  REGION 1..10: note = Synthetic Peptide
SHTQPLGVYL

SEQ ID NO: 2342 - protein, 10 aa, synthetic construct
  REGION 1..10: note = Synthetic Peptide
HTQPLGVYLL

SEQ ID NO: 2343 - protein, 10 aa, synthetic construct
  REGION 1..10: note = Synthetic Peptide
TQPLGVYLLT

SEQ ID NO: 2344 - protein, 10 aa, synthetic construct
  REGION 1..10: note = Synthetic Peptide
QPLGVYLLTP

SEQ ID NO: 2345 - protein, 9 aa, synthetic construct
  REGION 1..9: note = Synthetic Peptide
RWPESPKAQ

SEQ ID NO: 2346 - protein, 9 aa, synthetic construct
  REGION 1..9: note = Synthetic Peptide
WPESPKAQA

SEQ ID NO: 2347 - protein, 9 aa, synthetic construct
  REGION 1..9: note = Synthetic Peptide
PESPKAQAS

SEQ ID NO: 2348 - protein, 9 aa, synthetic construct
  REGION 1..9: note = Synthetic Peptide
ESPKAQASS

SEQ ID NO: 2349 - protein, 9 aa, synthetic construct
  REGION 1..9: note = Synthetic Peptide
SPKAQASSV

SEQ ID NO: 2350 - protein, 9 aa, synthetic construct
  REGION 1..9: note = Synthetic Peptide
PKAQASSVP

SEQ ID NO: 2351 - protein, 9 aa, synthetic construct
  REGION 1..9: note = Synthetic Peptide
KAQASSVPT

SEQ ID NO: 2352 - protein, 9 aa, synthetic construct
  REGION 1..9: note = Synthetic Peptide
AQASSVPTA

SEQ ID NO: 2353 - protein, 9 aa, synthetic construct
  REGION 1..9: note = Synthetic Peptide
QASSVPTAQ

SEQ ID NO: 2354 - protein, 9 aa, synthetic construct
  REGION 1..9: note = Synthetic Peptide
ASSVPTAQP

SEQ ID NO: 2355 - protein, 9 aa, synthetic construct
  REGION 1..9: note = Synthetic Peptide
SSVPTAQPQ

SEQ ID NO: 2356 - protein, 9 aa, synthetic construct
  REGION 1..9: note = Synthetic Peptide
SVPTAQPQA

SEQ ID NO: 2357 - protein, 9 aa, synthetic construct
  REGION 1..9: note = Synthetic Peptide
VPTAQPQAE

SEQ ID NO: 2358 - protein, 9 aa, synthetic construct
  REGION 1..9: note = Synthetic Peptide
PTAQPQAEG

SEQ ID NO: 2359 - protein, 9 aa, synthetic construct
  REGION 1..9: note = Synthetic Peptide
TAQPQAEGS

SEQ ID NO: 2360 - protein, 9 aa, synthetic construct
  REGION 1..9: note = Synthetic Peptide
AQPQAEGSL

SEQ ID NO: 2361 - protein, 9 aa, synthetic construct
  REGION 1..9: note = Synthetic Peptide
QPQAEGSLA

SEQ ID NO: 2362 - protein, 9 aa, synthetic construct
  REGION 1..9: note = Synthetic Peptide
PQAEGSLAK

SEQ ID NO: 2363 - protein, 9 aa, synthetic construct
  REGION 1..9: note = Synthetic Peptide
QAEGSLAKA

SEQ ID NO: 2364 - protein, 9 aa, synthetic construct
  REGION 1..9: note = Synthetic Peptide
AEGSLAKAT

SEQ ID NO: 2365 - protein, 9 aa, synthetic construct
  REGION 1..9: note = Synthetic Peptide
EGSLAKATT

SEQ ID NO: 2366 - protein, 9 aa, synthetic construct
  REGION 1..9: note = Synthetic Peptide
GSLAKATTA

SEQ ID NO: 2367 - protein, 9 aa, synthetic construct
  REGION 1..9: note = Synthetic Peptide
SLAKATTAP

SEQ ID NO: 2368 - protein, 9 aa, synthetic construct
  REGION 1..9: note = Synthetic Peptide
LAKATTAPA

SEQ ID NO: 2369 - protein, 9 aa, synthetic construct
  REGION 1..9: note = Synthetic Peptide
AKATTAPAT

SEQ ID NO: 2370 - protein, 9 aa, synthetic construct
  REGION 1..9: note = Synthetic Peptide
KATTAPATT

SEQ ID NO: 2371 - protein, 9 aa, synthetic construct
  REGION 1..9: note = Synthetic Peptide
ATTAPATTR

SEQ ID NO: 2372 - protein, 9 aa, synthetic construct
  REGION 1..9: note = Synthetic Peptide
TTAPATTRN

SEQ ID NO: 2373 - protein, 9 aa, synthetic construct
  REGION 1..9: note = Synthetic Peptide
TAPATTRNT

SEQ ID NO: 2374 - protein, 9 aa, synthetic construct
  REGION 1..9: note = Synthetic Peptide
APATTRNTG

SEQ ID NO: 2375 - protein, 9 aa, synthetic construct
  REGION 1..9: note = Synthetic Peptide
PATTRNTGR

SEQ ID NO: 2376 - protein, 9 aa, synthetic construct
  REGION 1..9: note = Synthetic Peptide
ATTRNTGRG

SEQ ID NO: 2377 - protein, 9 aa, synthetic construct
  REGION 1..9: note = Synthetic Peptide
TTRNTGRGG

SEQ ID NO: 2378 - protein, 9 aa, synthetic construct
  REGION 1..9: note = Synthetic Peptide
TRNTGRGGE

SEQ ID NO: 2379 - protein, 9 aa, synthetic construct
  REGION 1..9: note = Synthetic Peptide
RNTGRGGEE

SEQ ID NO: 2380 - protein, 9 aa, synthetic construct
  REGION 1..9: note = Synthetic Peptide
NTGRGGEEK

SEQ ID NO: 2381 - protein, 9 aa, synthetic construct
  REGION 1..9: note = Synthetic Peptide
TGRGGEEKK

SEQ ID NO: 2382 - protein, 9 aa, synthetic construct
  REGION 1..9: note = Synthetic Peptide
GRGGEEKKK

SEQ ID NO: 2383 - protein, 9 aa, synthetic construct
  REGION 1..9: note = Synthetic Peptide
RGGEEKKKE

SEQ ID NO: 2384 - protein, 9 aa, synthetic construct
  REGION 1..9: note = Synthetic Peptide
GGEEKKKEK

SEQ ID NO: 2385 - protein, 9 aa, synthetic construct
  REGION 1..9: note = Synthetic Peptide
GEEKKKEKE

SEQ ID NO: 2386 - protein, 9 aa, synthetic construct
  REGION 1..9: note = Synthetic Peptide
EEKKKEKEK

SEQ ID NO: 2387 - protein, 9 aa, synthetic construct
  REGION 1..9: note = Synthetic Peptide
EKKKEKEKE

SEQ ID NO: 2388 - protein, 9 aa, synthetic construct
  REGION 1..9: note = Synthetic Peptide
KKKEKEKEE

SEQ ID NO: 2389 - protein, 9 aa, synthetic construct
  REGION 1..9: note = Synthetic Peptide
KKEKEKEEQ

SEQ ID NO: 2390 - protein, 9 aa, synthetic construct
  REGION 1..9: note = Synthetic Peptide
KEKEKEEQE

SEQ ID NO: 2391 - protein, 9 aa, synthetic construct
  REGION 1..9: note = Synthetic Peptide
EKEKEEQEE

SEQ ID NO: 2392 - protein, 9 aa, synthetic construct
  REGION 1..9: note = Synthetic Peptide
KEKEEQEER

SEQ ID NO: 2393 - protein, 9 aa, synthetic construct
  REGION 1..9: note = Synthetic Peptide
EKEEQEERE

SEQ ID NO: 2394 - protein, 9 aa, synthetic construct
  REGION 1..9: note = Synthetic Peptide
KEEQEERET

SEQ ID NO: 2395 - protein, 9 aa, synthetic construct
  REGION 1..9: note = Synthetic Peptide
EEQEERETK

SEQ ID NO: 2396 - protein, 9 aa, synthetic construct
  REGION 1..9: note = Synthetic Peptide
EQEERETKT

SEQ ID NO: 2397 - protein, 9 aa, synthetic construct
  REGION 1..9: note = Synthetic Peptide
QEERETKTP

SEQ ID NO: 2398 - protein, 9 aa, synthetic construct
  REGION 1..9: note = Synthetic Peptide
EERETKTPE

SEQ ID NO: 2399 - protein, 9 aa, synthetic construct
  REGION 1..9: note = Synthetic Peptide
ERETKTPEC

SEQ ID NO: 2400 - protein, 9 aa, synthetic construct
  REGION 1..9: note = Synthetic Peptide
RETKTPECP

SEQ ID NO: 2401 - protein, 9 aa, synthetic construct
  REGION 1..9: note = Synthetic Peptide
ETKTPECPS

SEQ ID NO: 2402 - protein, 9 aa, synthetic construct
  REGION 1..9: note = Synthetic Peptide
TKTPECPSH

SEQ ID NO: 2403 - protein, 9 aa, synthetic construct
  REGION 1..9: note = Synthetic Peptide
KTPECPSHT

SEQ ID NO: 2404 - protein, 9 aa, synthetic construct
  REGION 1..9: note = Synthetic Peptide
TPECPSHTQ

SEQ ID NO: 2405 - protein, 9 aa, synthetic construct
  REGION 1..9: note = Synthetic Peptide
PECPSHTQP

SEQ ID NO: 2406 - protein, 9 aa, synthetic construct
  REGION 1..9: note = Synthetic Peptide
ECPSHTQPL

SEQ ID NO: 2407 - protein, 9 aa, synthetic construct
  REGION 1..9: note = Synthetic Peptide
CPSHTQPLG

SEQ ID NO: 2408 - protein, 9 aa, synthetic construct
  REGION 1..9: note = Synthetic Peptide
PSHTQPLGV

SEQ ID NO: 2409 - protein, 9 aa, synthetic construct
  REGION 1..9: note = Synthetic Peptide
SHTQPLGVY

SEQ ID NO: 2410 - protein, 9 aa, synthetic construct
  REGION 1..9: note = Synthetic Peptide
HTQPLGVYL

SEQ ID NO: 2411 - protein, 9 aa, synthetic construct
  REGION 1..9: note = Synthetic Peptide
TQPLGVYLL

SEQ ID NO: 2412 - protein, 9 aa, synthetic construct
  REGION 1..9: note = Synthetic Peptide
QPLGVYLLT

SEQ ID NO: 2413 - protein, 9 aa, synthetic construct
  REGION 1..9: note = Synthetic Peptide
PLGVYLLTP

SEQ ID NO: 2414 - protein, 8 aa, synthetic construct
  REGION 1..8: note = Synthetic Peptide
RWPESPKA

SEQ ID NO: 2415 - protein, 8 aa, synthetic construct
  REGION 1..8: note = Synthetic Peptide
WPESPKAQ

SEQ ID NO: 2416 - protein, 8 aa, synthetic construct
  REGION 1..8: note = Synthetic Peptide
PESPKAQA

SEQ ID NO: 2417 - protein, 8 aa, synthetic construct
  REGION 1..8: note = Synthetic Peptide
ESPKAQAS

SEQ ID NO: 2418 - protein, 8 aa, synthetic construct
  REGION 1..8: note = Synthetic Peptide
SPKAQASS

SEQ ID NO: 2419 - protein, 8 aa, synthetic construct
  REGION 1..8: note = Synthetic Peptide
PKAQASSV

SEQ ID NO: 2420 - protein, 8 aa, synthetic construct
  REGION 1..8: note = Synthetic Peptide
KAQASSVP

SEQ ID NO: 2421 - protein, 8 aa, synthetic construct
  REGION 1..8: note = Synthetic Peptide
AQASSVPT

SEQ ID NO: 2422 - protein, 8 aa, synthetic construct
  REGION 1..8: note = Synthetic Peptide
QASSVPTA

SEQ ID NO: 2423 - protein, 8 aa, synthetic construct
  REGION 1..8: note = Synthetic Peptide
ASSVPTAQ

SEQ ID NO: 2424 - protein, 8 aa, synthetic construct
  REGION 1..8: note = Synthetic Peptide
SSVPTAQP

SEQ ID NO: 2425 - protein, 8 aa, synthetic construct
  REGION 1..8: note = Synthetic Peptide
SVPTAQPQ

SEQ ID NO: 2426 - protein, 8 aa, synthetic construct
  REGION 1..8: note = Synthetic Peptide
VPTAQPQA

SEQ ID NO: 2427 - protein, 8 aa, synthetic construct
  REGION 1..8: note = Synthetic Peptide
PTAQPQAE

SEQ ID NO: 2428 - protein, 8 aa, synthetic construct
  REGION 1..8: note = Synthetic Peptide
TAQPQAEG

SEQ ID NO: 2429 - protein, 8 aa, synthetic construct
  REGION 1..8: note = Synthetic Peptide
AQPQAEGS

SEQ ID NO: 2430 - protein, 8 aa, synthetic construct
  REGION 1..8: note = Synthetic Peptide
QPQAEGSL

SEQ ID NO: 2431 - protein, 8 aa, synthetic construct
  REGION 1..8: note = Synthetic Peptide
PQAEGSLA

SEQ ID NO: 2432 - protein, 8 aa, synthetic construct
  REGION 1..8: note = Synthetic Peptide
QAEGSLAK

SEQ ID NO: 2433 - protein, 8 aa, synthetic construct
  REGION 1..8: note = Synthetic Peptide
AEGSLAKA

SEQ ID NO: 2434 - protein, 8 aa, synthetic construct
  REGION 1..8: note = Synthetic Peptide
EGSLAKAT

SEQ ID NO: 2435 - protein, 8 aa, synthetic construct
  REGION 1..8: note = Synthetic Peptide
GSLAKATT

SEQ ID NO: 2436 - protein, 8 aa, synthetic construct
  REGION 1..8: note = Synthetic Peptide
SLAKATTA

SEQ ID NO: 2437 - protein, 8 aa, synthetic construct
  REGION 1..8: note = Synthetic Peptide
LAKATTAP

SEQ ID NO: 2438 - protein, 8 aa, synthetic construct
  REGION 1..8: note = Synthetic Peptide
AKATTAPA

SEQ ID NO: 2439 - protein, 8 aa, synthetic construct
  REGION 1..8: note = Synthetic Peptide
KATTAPAT

SEQ ID NO: 2440 - protein, 8 aa, synthetic construct
  REGION 1..8: note = Synthetic Peptide
ATTAPATT

SEQ ID NO: 2441 - protein, 8 aa, synthetic construct
  REGION 1..8: note = Synthetic Peptide
TTAPATTR

SEQ ID NO: 2442 - protein, 8 aa, synthetic construct
  REGION 1..8: note = Synthetic Peptide
TAPATTRN

SEQ ID NO: 2443 - protein, 8 aa, synthetic construct
  REGION 1..8: note = Synthetic Peptide
APATTRNT

SEQ ID NO: 2444 - protein, 8 aa, synthetic construct
  REGION 1..8: note = Synthetic Peptide
PATTRNTG

SEQ ID NO: 2445 - protein, 8 aa, synthetic construct
  REGION 1..8: note = Synthetic Peptide
ATTRNTGR

SEQ ID NO: 2446 - protein, 8 aa, synthetic construct
  REGION 1..8: note = Synthetic Peptide
TTRNTGRG

SEQ ID NO: 2447 - protein, 8 aa, synthetic construct
  REGION 1..8: note = Synthetic Peptide
TRNTGRGG

SEQ ID NO: 2448 - protein, 8 aa, synthetic construct
  REGION 1..8: note = Synthetic Peptide
RNTGRGGE

SEQ ID NO: 2449 - protein, 8 aa, synthetic construct
  REGION 1..8: note = Synthetic Peptide
NTGRGGEE

SEQ ID NO: 2450 - protein, 8 aa, synthetic construct
  REGION 1..8: note = Synthetic Peptide
TGRGGEEK

SEQ ID NO: 2451 - protein, 8 aa, synthetic construct
  REGION 1..8: note = Synthetic Peptide
GRGGEEKK

SEQ ID NO: 2452 - protein, 8 aa, synthetic construct
  REGION 1..8: note = Synthetic Peptide
RGGEEKKK

SEQ ID NO: 2453 - protein, 8 aa, synthetic construct
  REGION 1..8: note = Synthetic Peptide
GGEEKKKE

SEQ ID NO: 2454 - protein, 8 aa, synthetic construct
  REGION 1..8: note = Synthetic Peptide
GEEKKKEK

SEQ ID NO: 2455 - protein, 8 aa, synthetic construct
  REGION 1..8: note = Synthetic Peptide
EEKKKEKE

SEQ ID NO: 2456 - protein, 8 aa, synthetic construct
  REGION 1..8: note = Synthetic Peptide
EKKKEKEK

SEQ ID NO: 2457 - protein, 8 aa, synthetic construct
  REGION 1..8: note = Synthetic Peptide
KKKEKEKE

SEQ ID NO: 2458 - protein, 8 aa, synthetic construct
  REGION 1..8: note = Synthetic Peptide
KKEKEKEE

SEQ ID NO: 2459 - protein, 8 aa, synthetic construct
  REGION 1..8: note = Synthetic Peptide
KEKEKEEQ

SEQ ID NO: 2460 - protein, 8 aa, synthetic construct
  REGION 1..8: note = Synthetic Peptide
EKEKEEQE

SEQ ID NO: 2461 - protein, 8 aa, synthetic construct
  REGION 1..8: note = Synthetic Peptide
KEKEEQEE

SEQ ID NO: 2462 - protein, 8 aa, synthetic construct
  REGION 1..8: note = Synthetic Peptide
EKEEQEER

SEQ ID NO: 2463 - protein, 8 aa, synthetic construct
  REGION 1..8: note = Synthetic Peptide
KEEQEERE

SEQ ID NO: 2464 - protein, 8 aa, synthetic construct
  REGION 1..8: note = Synthetic Peptide
EEQEERET

SEQ ID NO: 2465 - protein, 8 aa, synthetic construct
  REGION 1..8: note = Synthetic Peptide
EQEERETK

SEQ ID NO: 2466 - protein, 8 aa, synthetic construct
  REGION 1..8: note = Synthetic Peptide
QEERETKT

SEQ ID NO: 2467 - protein, 8 aa, synthetic construct
  REGION 1..8: note = Synthetic Peptide
EERETKTP

SEQ ID NO: 2468 - protein, 8 aa, synthetic construct
  REGION 1..8: note = Synthetic Peptide
ERETKTPE

SEQ ID NO: 2469 - protein, 8 aa, synthetic construct
  REGION 1..8: note = Synthetic Peptide
RETKTPEC

SEQ ID NO: 2470 - protein, 8 aa, synthetic construct
  REGION 1..8: note = Synthetic Peptide
ETKTPECP

SEQ ID NO: 2471 - protein, 8 aa, synthetic construct
  REGION 1..8: note = Synthetic Peptide
TKTPECPS

SEQ ID NO: 2472 - protein, 8 aa, synthetic construct
  REGION 1..8: note = Synthetic Peptide
KTPECPSH

SEQ ID NO: 2473 - protein, 8 aa, synthetic construct
  REGION 1..8: note = Synthetic Peptide
TPECPSHT

SEQ ID NO: 2474 - protein, 8 aa, synthetic construct
  REGION 1..8: note = Synthetic Peptide
PECPSHTQ

SEQ ID NO: 2475 - protein, 8 aa, synthetic construct
  REGION 1..8: note = Synthetic Peptide
ECPSHTQP

SEQ ID NO: 2476 - protein, 8 aa, synthetic construct
  REGION 1..8: note = Synthetic Peptide
CPSHTQPL

SEQ ID NO: 2477 - protein, 8 aa, synthetic construct
  REGION 1..8: note = Synthetic Peptide
PSHTQPLG

SEQ ID NO: 2478 - protein, 8 aa, synthetic construct
  REGION 1..8: note = Synthetic Peptide
SHTQPLGV

SEQ ID NO: 2479 - protein, 8 aa, synthetic construct
  REGION 1..8: note = Synthetic Peptide
HTQPLGVY

SEQ ID NO: 2480 - protein, 8 aa, synthetic construct
  REGION 1..8: note = Synthetic Peptide
TQPLGVYL

SEQ ID NO: 2481 - protein, 8 aa, synthetic construct
  REGION 1..8: note = Synthetic Peptide
QPLGVYLL

SEQ ID NO: 2482 - protein, 8 aa, synthetic construct
  REGION 1..8: note = Synthetic Peptide
PLGVYLLT

SEQ ID NO: 2483 - protein, 8 aa, synthetic construct
  REGION 1..8: note = Synthetic Peptide
LGVYLLTP

SEQ ID NO: 2484 - protein, 7 aa, synthetic construct
  REGION 1..7: note = Synthetic Peptide
RWPESPK

SEQ ID NO: 2485 - protein, 7 aa, synthetic construct
  REGION 1..7: note = Synthetic Peptide
WPESPKA

SEQ ID NO: 2486 - protein, 7 aa, synthetic construct
  REGION 1..7: note = Synthetic Peptide
PESPKAQ

SEQ ID NO: 2487 - protein, 7 aa, synthetic construct
  REGION 1..7: note = Synthetic Peptide
ESPKAQA

SEQ ID NO: 2488 - protein, 7 aa, synthetic construct
  REGION 1..7: note = Synthetic Peptide
SPKAQAS

SEQ ID NO: 2489 - protein, 7 aa, synthetic construct
  REGION 1..7: note = Synthetic Peptide
PKAQASS

SEQ ID NO: 2490 - protein, 7 aa, synthetic construct
  REGION 1..7: note = Synthetic Peptide
KAQASSV

SEQ ID NO: 2491 - protein, 7 aa, synthetic construct
  REGION 1..7: note = Synthetic Peptide
AQASSVP

SEQ ID NO: 2492 - protein, 7 aa, synthetic construct
  REGION 1..7: note = Synthetic Peptide
QASSVPT

SEQ ID NO: 2493 - protein, 7 aa, synthetic construct
  REGION 1..7: note = Synthetic Peptide
ASSVPTA

SEQ ID NO: 2494 - protein, 7 aa, synthetic construct
  REGION 1..7: note = Synthetic Peptide
SSVPTAQ

SEQ ID NO: 2495 - protein, 7 aa, synthetic construct
  REGION 1..7: note = Synthetic Peptide
SVPTAQP

SEQ ID NO: 2496 - protein, 7 aa, synthetic construct
  REGION 1..7: note = Synthetic Peptide
VPTAQPQ

SEQ ID NO: 2497 - protein, 7 aa, synthetic construct
  REGION 1..7: note = Synthetic Peptide
PTAQPQA

SEQ ID NO: 2498 - protein, 7 aa, synthetic construct
  REGION 1..7: note = Synthetic Peptide
TAQPQAE

SEQ ID NO: 2499 - protein, 7 aa, synthetic construct
  REGION 1..7: note = Synthetic Peptide
AQPQAEG

SEQ ID NO: 2500 - protein, 7 aa, synthetic construct
  REGION 1..7: note = Synthetic Peptide
QPQAEGS

SEQ ID NO: 2501 - protein, 7 aa, synthetic construct
  REGION 1..7: note = Synthetic Peptide
PQAEGSL

SEQ ID NO: 2502 - protein, 7 aa, synthetic construct
  REGION 1..7: note = Synthetic Peptide
QAEGSLA

SEQ ID NO: 2503 - protein, 7 aa, synthetic construct
  REGION 1..7: note = Synthetic Peptide
AEGSLAK

SEQ ID NO: 2504 - protein, 7 aa, synthetic construct
  REGION 1..7: note = Synthetic Peptide
EGSLAKA

SEQ ID NO: 2505 - protein, 7 aa, synthetic construct
  REGION 1..7: note = Synthetic Peptide
GSLAKAT

SEQ ID NO: 2506 - protein, 7 aa, synthetic construct
  REGION 1..7: note = Synthetic Peptide
SLAKATT

SEQ ID NO: 2507 - protein, 7 aa, synthetic construct
  REGION 1..7: note = Synthetic Peptide
LAKATTA

SEQ ID NO: 2508 - protein, 7 aa, synthetic construct
  REGION 1..7: note = Synthetic Peptide
AKATTAP

SEQ ID NO: 2509 - protein, 7 aa, synthetic construct
  REGION 1..7: note = Synthetic Peptide
KATTAPA

SEQ ID NO: 2510 - protein, 7 aa, synthetic construct
  REGION 1..7: note = Synthetic Peptide
ATTAPAT

SEQ ID NO: 2511 - protein, 7 aa, synthetic construct
  REGION 1..7: note = Synthetic Peptide
TTAPATT

SEQ ID NO: 2512 - protein, 7 aa, synthetic construct
  REGION 1..7: note = Synthetic Peptide
TAPATTR

SEQ ID NO: 2513 - protein, 7 aa, synthetic construct
  REGION 1..7: note = Synthetic Peptide
APATTRN

SEQ ID NO: 2514 - protein, 7 aa, synthetic construct
  REGION 1..7: note = Synthetic Peptide
PATTRNT

SEQ ID NO: 2515 - protein, 7 aa, synthetic construct
  REGION 1..7: note = Synthetic Peptide
ATTRNTG

SEQ ID NO: 2516 - protein, 7 aa, synthetic construct
  REGION 1..7: note = Synthetic Peptide
TTRNTGR

SEQ ID NO: 2517 - protein, 7 aa, synthetic construct
  REGION 1..7: note = Synthetic Peptide
TRNTGRG

SEQ ID NO: 2518 - protein, 7 aa, synthetic construct
  REGION 1..7: note = Synthetic Peptide
RNTGRGG

SEQ ID NO: 2519 - protein, 7 aa, synthetic construct
  REGION 1..7: note = Synthetic Peptide
NTGRGGE

SEQ ID NO: 2520 - protein, 7 aa, synthetic construct
  REGION 1..7: note = Synthetic Peptide
TGRGGEE

SEQ ID NO: 2521 - protein, 7 aa, synthetic construct
  REGION 1..7: note = Synthetic Peptide
GRGGEEK

SEQ ID NO: 2522 - protein, 7 aa, synthetic construct
  REGION 1..7: note = Synthetic Peptide
RGGEEKK

SEQ ID NO: 2523 - protein, 7 aa, synthetic construct
  REGION 1..7: note = Synthetic Peptide
GGEEKKK

SEQ ID NO: 2524 - protein, 7 aa, synthetic construct
  REGION 1..7: note = Synthetic Peptide
GEEKKKE

SEQ ID NO: 2525 - protein, 7 aa, synthetic construct
  REGION 1..7: note = Synthetic Peptide
EEKKKEK

SEQ ID NO: 2526 - protein, 7 aa, synthetic construct
  REGION 1..7: note = Synthetic Peptide
EKKKEKE

SEQ ID NO: 2527 - protein, 7 aa, synthetic construct
  REGION 1..7: note = Synthetic Peptide
KKKEKEK

SEQ ID NO: 2528 - protein, 7 aa, synthetic construct
  REGION 1..7: note = Synthetic Peptide
KKEKEKE

SEQ ID NO: 2529 - protein, 7 aa, synthetic construct
  REGION 1..7: note = Synthetic Peptide
KEKEKEE

SEQ ID NO: 2530 - protein, 7 aa, synthetic construct
  REGION 1..7: note = Synthetic Peptide
EKEKEEQ

SEQ ID NO: 2531 - protein, 7 aa, synthetic construct
  REGION 1..7: note = Synthetic Peptide
KEKEEQE

SEQ ID NO: 2532 - protein, 7 aa, synthetic construct
  REGION 1..7: note = Synthetic Peptide
EKEEQEE

SEQ ID NO: 2533 - protein, 7 aa, synthetic construct
  REGION 1..7: note = Synthetic Peptide
KEEQEER

SEQ ID NO: 2534 - protein, 7 aa, synthetic construct
  REGION 1..7: note = Synthetic Peptide
EEQEERE

SEQ ID NO: 2535 - protein, 7 aa, synthetic construct
  REGION 1..7: note = Synthetic Peptide
EQEERET

SEQ ID NO: 2536 - protein, 7 aa, synthetic construct
  REGION 1..7: note = Synthetic Peptide
QEERETK

SEQ ID NO: 2537 - protein, 7 aa, synthetic construct
  REGION 1..7: note = Synthetic Peptide
EERETKT

SEQ ID NO: 2538 - protein, 7 aa, synthetic construct
  REGION 1..7: note = Synthetic Peptide
ERETKTP

SEQ ID NO: 2539 - protein, 7 aa, synthetic construct
  REGION 1..7: note = Synthetic Peptide
RETKTPR

SEQ ID NO: 2540 - protein, 7 aa, synthetic construct
  REGION 1..7: note = Synthetic Peptide
ETKTPRE

SEQ ID NO: 2541 - protein, 7 aa, synthetic construct
  REGION 1..7: note = Synthetic Peptide
TKTPRET

SEQ ID NO: 2542 - protein, 7 aa, synthetic construct
  REGION 1..7: note = Synthetic Peptide
KTPRETK

SEQ ID NO: 2543 - protein, 7 aa, synthetic construct
  REGION 1..7: note = Synthetic Peptide
TPRETKT

SEQ ID NO: 2544 - protein, 7 aa, synthetic construct
  REGION 1..7: note = Synthetic Peptide
PRETKTP

SEQ ID NO: 2545 - protein, 7 aa, synthetic construct
  REGION 1..7: note = Synthetic Peptide
RETKTPE

SEQ ID NO: 2546 - protein, 7 aa, synthetic construct
  REGION 1..7: note = Synthetic Peptide
ETKTPEC

SEQ ID NO: 2547 - protein, 7 aa, synthetic construct
  REGION 1..7: note = Synthetic Peptide
TKTPECP

SEQ ID NO: 2548 - protein, 7 aa, synthetic construct
  REGION 1..7: note = Synthetic Peptide
KTPECPS

SEQ ID NO: 2549 - protein, 7 aa, synthetic construct
  REGION 1..7: note = Synthetic Peptide
TPECPSH

SEQ ID NO: 2550 - protein, 7 aa, synthetic construct
  REGION 1..7: note = Synthetic Peptide
PECPSHT

SEQ ID NO: 2551 - protein, 7 aa, synthetic construct
  REGION 1..7: note = Synthetic Peptide
ECPSHTQ

SEQ ID NO: 2552 - protein, 7 aa, synthetic construct
  REGION 1..7: note = Synthetic Peptide
CPSHTQP

SEQ ID NO: 2553 - protein, 7 aa, synthetic construct
  REGION 1..7: note = Synthetic Peptide
PSHTQPL

SEQ ID NO: 2554 - protein, 7 aa, synthetic construct
  REGION 1..7: note = Synthetic Peptide
SHTQPLG

SEQ ID NO: 2555 - protein, 7 aa, synthetic construct
  REGION 1..7: note = Synthetic Peptide
HTQPLGV

SEQ ID NO: 2556 - protein, 7 aa, synthetic construct
  REGION 1..7: note = Synthetic Peptide
TQPLGVY

SEQ ID NO: 2557 - protein, 7 aa, synthetic construct
  REGION 1..7: note = Synthetic Peptide
QPLGVYL

SEQ ID NO: 2558 - protein, 7 aa, synthetic construct
  REGION 1..7: note = Synthetic Peptide
PLGVYLL

SEQ ID NO: 2559 - protein, 7 aa, synthetic construct
  REGION 1..7: note = Synthetic Peptide
LGVYLLT

SEQ ID NO: 2560 - protein, 23 aa, synthetic construct
  REGION 1..23: note = Synthetic Peptide
PVPSTPPTPSPSTPPTPSPSCCH

SEQ ID NO: 2561 - protein, 22 aa, synthetic construct
  REGION 1..22: note = Synthetic Peptide
PVPSTPPTPSPSTPPTPSPSCC

SEQ ID NO: 2562 - protein, 22 aa, synthetic construct
  REGION 1..22: note = Synthetic Peptide
VPSTPPTPSPSTPPTPSPSCCH

SEQ ID NO: 2563 - protein, 21 aa, synthetic construct
  REGION 1..21: note = Synthetic Peptide
PVPSTPPTPSPSTPPTPSPSC

SEQ ID NO: 2564 - protein, 21 aa, synthetic construct
  REGION 1..21: note = Synthetic Peptide
VPSTPPTPSPSTPPTPSPSCC

SEQ ID NO: 2565 - protein, 21 aa, synthetic construct
  REGION 1..21: note = Synthetic Peptide
PSTPPTPSPSTPPTPSPSCCH

SEQ ID NO: 2566 - protein, 20 aa, synthetic construct
  REGION 1..20: note = Synthetic Peptide
PVPSTPPTPSPSTPPTPSPS

SEQ ID NO: 2567 - protein, 20 aa, synthetic construct
  REGION 1..20: note = Synthetic Peptide
VPSTPPTPSPSTPPTPSPSC

SEQ ID NO: 2568 - protein, 20 aa, synthetic construct
  REGION 1..20: note = Synthetic Peptide
PSTPPTPSPSTPPTPSPSCC

SEQ ID NO: 2569 - protein, 20 aa, synthetic construct
  REGION 1..20: note = Synthetic Peptide
STPPTPSPSTPPTPSPSCCH

SEQ ID NO: 2570 - protein, 19 aa, synthetic construct
  REGION 1..19: note = Synthetic Peptide
PVPSTPPTPSPSTPPTPSP

SEQ ID NO: 2571 - protein, 19 aa, synthetic construct
  REGION 1..19: note = Synthetic Peptide
VPSTPPTPSPSTPPTPSPS

SEQ ID NO: 2572 - protein, 19 aa, synthetic construct
  REGION 1..19: note = Synthetic Peptide
PSTPPTPSPSTPPTPSPSC

SEQ ID NO: 2573 - protein, 19 aa, synthetic construct
  REGION 1..19: note = Synthetic Peptide
STPPTPSPSTPPTPSPSCC

SEQ ID NO: 2574 - protein, 19 aa, synthetic construct
  REGION 1..19: note = Synthetic Peptide
TPPTPSPSTPPTPSPSCCH

SEQ ID NO: 2575 - protein, 18 aa, synthetic construct
  REGION 1..18: note = Synthetic Peptide
PVPSTPPTPSPSTPPTPS

SEQ ID NO: 2576 - protein, 18 aa, synthetic construct
  REGION 1..18: note = Synthetic Peptide
VPSTPPTPSPSTPPTPSP

SEQ ID NO: 2577 - protein, 18 aa, synthetic construct
  REGION 1..18: note = Synthetic Peptide
PSTPPTPSPSTPPTPSPS

SEQ ID NO: 2578 - protein, 18 aa, synthetic construct
  REGION 1..18: note = Synthetic Peptide
STPPTPSPSTPPTPSPSC

SEQ ID NO: 2579 - protein, 18 aa, synthetic construct
  REGION 1..18: note = Synthetic Peptide
TPPTPSPSTPPTPSPSCC

SEQ ID NO: 2580 - protein, 18 aa, synthetic construct
  REGION 1..18: note = Synthetic Peptide
PPTPSPSTPPTPSPSCCH

SEQ ID NO: 2581 - protein, 17 aa, synthetic construct
  REGION 1..17: note = Synthetic Peptide
PVPSTPPTPSPSTPPTP

SEQ ID NO: 2582 - protein, 17 aa, synthetic construct
  REGION 1..17: note = Synthetic Peptide
VPSTPPTPSPSTPPTPS

SEQ ID NO: 2583 - protein, 17 aa, synthetic construct
  REGION 1..17: note = Synthetic Peptide
PSTPPTPSPSTPPTPSP

SEQ ID NO: 2584 - protein, 17 aa, synthetic construct
  REGION 1..17: note = Synthetic Peptide
STPPTPSPSTPPTPSPS

SEQ ID NO: 2585 - protein, 17 aa, synthetic construct
  REGION 1..17: note = Synthetic Peptide
TPPTPSPSTPPTPSPSC

SEQ ID NO: 2586 - protein, 17 aa, synthetic construct
  REGION 1..17: note = Synthetic Peptide
PPTPSPSTPPTPSPSCC

SEQ ID NO: 2587 - protein, 17 aa, synthetic construct
  REGION 1..17: note = Synthetic Peptide
PTPSPSTPPTPSPSCCH

SEQ ID NO: 2588 - protein, 16 aa, synthetic construct
  REGION 1..16: note = Synthetic Peptide
PVPSTPPTPSPSTPPT

SEQ ID NO: 2589 - protein, 16 aa, synthetic construct
  REGION 1..16: note = Synthetic Peptide
VPSTPPTPSPSTPPTP

SEQ ID NO: 2590 - protein, 16 aa, synthetic construct
  REGION 1..16: note = Synthetic Peptide
PSTPPTPSPSTPPTPS

SEQ ID NO: 2591 - protein, 16 aa, synthetic construct
  REGION 1..16: note = Synthetic Peptide
STPPTPSPSTPPTPSP

SEQ ID NO: 2592 - protein, 16 aa, synthetic construct
  REGION 1..16: note = Synthetic Peptide
TPPTPSPSTPPTPSPS

SEQ ID NO: 2593 - protein, 16 aa, synthetic construct
  REGION 1..16: note = Synthetic Peptide
PPTPSPSTPPTPSPSC

SEQ ID NO: 2594 - protein, 16 aa, synthetic construct
  REGION 1..16: note = Synthetic Peptide
PTPSPSTPPTPSPSCC

SEQ ID NO: 2595 - protein, 16 aa, synthetic construct
  REGION 1..16: note = Synthetic Peptide
TPSPSTPPTPSPSCCH

SEQ ID NO: 2596 - protein, 15 aa, synthetic construct
  REGION 1..15: note = Synthetic Peptide
PVPSTPPTPSPSTPP

SEQ ID NO: 2597 - protein, 15 aa, synthetic construct
  REGION 1..15: note = Synthetic Peptide
VPSTPPTPSPSTPPT

SEQ ID NO: 2598 - protein, 15 aa, synthetic construct
  REGION 1..15: note = Synthetic Peptide
PSTPPTPSPSTPPTP

SEQ ID NO: 2599 - protein, 15 aa, synthetic construct
  REGION 1..15: note = Synthetic Peptide
STPPTPSPSTPPTPS

SEQ ID NO: 2600 - protein, 15 aa, synthetic construct
  REGION 1..15: note = Synthetic Peptide
TPPTPSPSTPPTPSP

SEQ ID NO: 2601 - protein, 15 aa, synthetic construct
  REGION 1..15: note = Synthetic Peptide
PPTPSPSTPPTPSPS

SEQ ID NO: 2602 - protein, 15 aa, synthetic construct
  REGION 1..15: note = Synthetic Peptide
PTPSPSTPPTPSPSC

SEQ ID NO: 2603 - protein, 15 aa, synthetic construct
  REGION 1..15: note = Synthetic Peptide
TPSPSTPPTPSPSCC

SEQ ID NO: 2604 - protein, 15 aa, synthetic construct
  REGION 1..15: note = Synthetic Peptide
PSPSTPPTPSPSCCH

SEQ ID NO: 2605 - protein, 14 aa, synthetic construct
  REGION 1..14: note = Synthetic Peptide
PVPSTPPTPSPSTP

SEQ ID NO: 2606 - protein, 14 aa, synthetic construct
  REGION 1..14: note = Synthetic Peptide
VPSTPPTPSPSTPP

SEQ ID NO: 2607 - protein, 14 aa, synthetic construct
  REGION 1..14: note = Synthetic Peptide
PSTPPTPSPSTPPT

SEQ ID NO: 2608 - protein, 14 aa, synthetic construct
  REGION 1..14: note = Synthetic Peptide
STPPTPSPSTPPTP

SEQ ID NO: 2609 - protein, 14 aa, synthetic construct
  REGION 1..14: note = Synthetic Peptide
TPPTPSPSTPPTPS

SEQ ID NO: 2610 - protein, 14 aa, synthetic construct
  REGION 1..14: note = Synthetic Peptide
PPTPSPSTPPTPSP

SEQ ID NO: 2611 - protein, 14 aa, synthetic construct
  REGION 1..14: note = Synthetic Peptide
PTPSPSTPPTPSPS

SEQ ID NO: 2612 - protein, 14 aa, synthetic construct
  REGION 1..14: note = Synthetic Peptide
TPSPSTPPTPSPSC

SEQ ID NO: 2613 - protein, 14 aa, synthetic construct
  REGION 1..14: note = Synthetic Peptide
PSPSTPPTPSPSCC

SEQ ID NO: 2614 - protein, 14 aa, synthetic construct
  REGION 1..14: note = Synthetic Peptide
SPSTPPTPSPSCCH

SEQ ID NO: 2615 - protein, 13 aa, synthetic construct
  REGION 1..13: note = Synthetic Peptide
PVPSTPPTPSPST

SEQ ID NO: 2616 - protein, 13 aa, synthetic construct
  REGION 1..13: note = Synthetic Peptide
VPSTPPTPSPSTP

SEQ ID NO: 2617 - protein, 13 aa, synthetic construct
  REGION 1..13: note = Synthetic Peptide
PSTPPTPSPSTPP

SEQ ID NO: 2618 - protein, 13 aa, synthetic construct
  REGION 1..13: note = Synthetic Peptide
STPPTPSPSTPPT

SEQ ID NO: 2619 - protein, 13 aa, synthetic construct
  REGION 1..13: note = Synthetic Peptide
TPPTPSPSTPPTP

SEQ ID NO: 2620 - protein, 13 aa, synthetic construct
  REGION 1..13: note = Synthetic Peptide
PPTPSPSTPPTPS

SEQ ID NO: 2621 - protein, 13 aa, synthetic construct
  REGION 1..13: note = Synthetic Peptide
PTPSPSTPPTPSP

SEQ ID NO: 2622 - protein, 13 aa, synthetic construct
  REGION 1..13: note = Synthetic Peptide
TPSPSTPPTPSPS

SEQ ID NO: 2623 - protein, 13 aa, synthetic construct
  REGION 1..13: note = Synthetic Peptide
PSPSTPPTPSPSC

SEQ ID NO: 2624 - protein, 13 aa, synthetic construct
  REGION 1..13: note = Synthetic Peptide
SPSTPPTPSPSCC

SEQ ID NO: 2625 - protein, 13 aa, synthetic construct
  REGION 1..13: note = Synthetic Peptide
PSTPPTPSPSCCH

SEQ ID NO: 2626 - protein, 12 aa, synthetic construct
  REGION 1..12: note = Synthetic Peptide
PVPSTPPTPSPS

SEQ ID NO: 2627 - protein, 12 aa, synthetic construct
  REGION 1..12: note = Synthetic Peptide
VPSTPPTPSPST

SEQ ID NO: 2628 - protein, 12 aa, synthetic construct
  REGION 1..12: note = Synthetic Peptide
PSTPPTPSPSTP

SEQ ID NO: 2629 - protein, 12 aa, synthetic construct
  REGION 1..12: note = Synthetic Peptide
STPPTPSPSTPP

SEQ ID NO: 2630 - protein, 12 aa, synthetic construct
  REGION 1..12: note = Synthetic Peptide
TPPTPSPSTPPT

SEQ ID NO: 2631 - protein, 12 aa, synthetic construct
  REGION 1..12: note = Synthetic Peptide
PPTPSPSTPPTP

SEQ ID NO: 2632 - protein, 12 aa, synthetic construct
  REGION 1..12: note = Synthetic Peptide
PTPSPSTPPTPS

SEQ ID NO: 2633 - protein, 12 aa, synthetic construct
  REGION 1..12: note = Synthetic Peptide
TPSPSTPPTPSP

SEQ ID NO: 2634 - protein, 12 aa, synthetic construct
  REGION 1..12: note = Synthetic Peptide
PSPSTPPTPSPS

SEQ ID NO: 2635 - protein, 12 aa, synthetic construct
  REGION 1..12: note = Synthetic Peptide
SPSTPPTPSPSC

SEQ ID NO: 2636 - protein, 12 aa, synthetic construct
  REGION 1..12: note = Synthetic Peptide
PSTPPTPSPSCC

SEQ ID NO: 2637 - protein, 12 aa, synthetic construct
  REGION 1..12: note = Synthetic Peptide
STPPTPSPSCCH

SEQ ID NO: 2638 - protein, 11 aa, synthetic construct
  REGION 1..11: note = Synthetic Peptide
PVPSTPPTPSP

SEQ ID NO: 2639 - protein, 11 aa, synthetic construct
  REGION 1..11: note = Synthetic Peptide
VPSTPPTPSPS

SEQ ID NO: 2640 - protein, 11 aa, synthetic construct
  REGION 1..11: note = Synthetic Peptide
PSTPPTPSPST

SEQ ID NO: 2641 - protein, 11 aa, synthetic construct
  REGION 1..11: note = Synthetic Peptide
STPPTPSPSTP

SEQ ID NO: 2642 - protein, 11 aa, synthetic construct
  REGION 1..11: note = Synthetic Peptide
TPPTPSPSTPP

SEQ ID NO: 2643 - protein, 11 aa, synthetic construct
  REGION 1..11: note = Synthetic Peptide
PPTPSPSTPPT

SEQ ID NO: 2644 - protein, 11 aa, synthetic construct
  REGION 1..11: note = Synthetic Peptide
PTPSPSTPPTP

SEQ ID NO: 2645 - protein, 11 aa, synthetic construct
  REGION 1..11: note = Synthetic Peptide
TPSPSTPPTPS

SEQ ID NO: 2646 - protein, 11 aa, synthetic construct
  REGION 1..11: note = Synthetic Peptide
PSPSTPPTPSP

SEQ ID NO: 2647 - protein, 11 aa, synthetic construct
  REGION 1..11: note = Synthetic Peptide
SPSTPPTPSPS

SEQ ID NO: 2648 - protein, 11 aa, synthetic construct
  REGION 1..11: note = Synthetic Peptide
PSTPPTPSPSC

SEQ ID NO: 2649 - protein, 11 aa, synthetic construct
  REGION 1..11: note = Synthetic Peptide
STPPTPSPSCC

SEQ ID NO: 2650 - protein, 11 aa, synthetic construct
  REGION 1..11: note = Synthetic Peptide
TPPTPSPSCCH

SEQ ID NO: 2651 - protein, 10 aa, synthetic construct
  REGION 1..10: note = Synthetic Peptide
PVPSTPPTPS

SEQ ID NO: 2652 - protein, 10 aa, synthetic construct
  REGION 1..10: note = Synthetic Peptide
VPSTPPTPSP

SEQ ID NO: 2653 - protein, 10 aa, synthetic construct
  REGION 1..10: note = Synthetic Peptide
PSTPPTPSPS

SEQ ID NO: 2654 - protein, 10 aa, synthetic construct
  REGION 1..10: note = Synthetic Peptide
STPPTPSPST

SEQ ID NO: 2655 - protein, 10 aa, synthetic construct
  REGION 1..10: note = Synthetic Peptide
TPPTPSPSTP

SEQ ID NO: 2656 - protein, 10 aa, synthetic construct
  REGION 1..10: note = Synthetic Peptide
PPTPSPSTPP

SEQ ID NO: 2657 - protein, 10 aa, synthetic construct
  REGION 1..10: note = Synthetic Peptide
PTPSPSTPPT

SEQ ID NO: 2658 - protein, 10 aa, synthetic construct
  REGION 1..10: note = Synthetic Peptide
TPSPSTPPTP

SEQ ID NO: 2659 - protein, 10 aa, synthetic construct
  REGION 1..10: note = Synthetic Peptide
PSPSTPPTPS

SEQ ID NO: 2660 - protein, 10 aa, synthetic construct
  REGION 1..10: note = Synthetic Peptide
SPSTPPTPSP

SEQ ID NO: 2661 - protein, 10 aa, synthetic construct
  REGION 1..10: note = Synthetic Peptide
PSTPPTPSPS

SEQ ID NO: 2662 - protein, 10 aa, synthetic construct
  REGION 1..10: note = Synthetic Peptide
STPPTPSPSC

SEQ ID NO: 2663 - protein, 10 aa, synthetic construct
  REGION 1..10: note = Synthetic Peptide
TPPTPSPSCC

SEQ ID NO: 2664 - protein, 10 aa, synthetic construct
  REGION 1..10: note = Synthetic Peptide
PPTPSPSCCH

SEQ ID NO: 2665 - protein, 9 aa, synthetic construct
  REGION 1..9: note = Synthetic Peptide
PVPSTPPTP

SEQ ID NO: 2666 - protein, 9 aa, synthetic construct
  REGION 1..9: note = Synthetic Peptide
VPSTPPTPS

SEQ ID NO: 2667 - protein, 9 aa, synthetic construct
  REGION 1..9: note = Synthetic Peptide
PSTPPTPSP

SEQ ID NO: 2668 - protein, 9 aa, synthetic construct
  REGION 1..9: note = Synthetic Peptide
STPPTPSPS

SEQ ID NO: 2669 - protein, 9 aa, synthetic construct
  REGION 1..9: note = Synthetic Peptide
TPPTPSPST

SEQ ID NO: 2670 - protein, 9 aa, synthetic construct
  REGION 1..9: note = Synthetic Peptide
PPTPSPSTP

SEQ ID NO: 2671 - protein, 9 aa, synthetic construct
  REGION 1..9: note = Synthetic Peptide
PTPSPSTPP

SEQ ID NO: 2672 - protein, 9 aa, synthetic construct
  REGION 1..9: note = Synthetic Peptide
TPSPSTPPT

SEQ ID NO: 2673 - protein, 9 aa, synthetic construct
  REGION 1..9: note = Synthetic Peptide
PSPSTPPTP

SEQ ID NO: 2674 - protein, 9 aa, synthetic construct
  REGION 1..9: note = Synthetic Peptide
SPSTPPTPS

SEQ ID NO: 2675 - protein, 9 aa, synthetic construct
  REGION 1..9: note = Synthetic Peptide
PSTPPTPSP

SEQ ID NO: 2676 - protein, 9 aa, synthetic construct
  REGION 1..9: note = Synthetic Peptide
STPPTPSPS

SEQ ID NO: 2677 - protein, 9 aa, synthetic construct
  REGION 1..9: note = Synthetic Peptide
TPPTPSPSC

SEQ ID NO: 2678 - protein, 9 aa, synthetic construct
  REGION 1..9: note = Synthetic Peptide
PPTPSPSCC

SEQ ID NO: 2679 - protein, 9 aa, synthetic construct
  REGION 1..9: note = Synthetic Peptide
PTPSPSCCH

SEQ ID NO: 2680 - protein, 8 aa, synthetic construct
  REGION 1..8: note = Synthetic Peptide
PVPSTPPT

SEQ ID NO: 2681 - protein, 8 aa, synthetic construct
  REGION 1..8: note = Synthetic Peptide
VPSTPPTP

SEQ ID NO: 2682 - protein, 8 aa, synthetic construct
  REGION 1..8: note = Synthetic Peptide
PSTPPTPS

SEQ ID NO: 2683 - protein, 8 aa, synthetic construct
  REGION 1..8: note = Synthetic Peptide
STPPTPSP

SEQ ID NO: 2684 - protein, 8 aa, synthetic construct
  REGION 1..8: note = Synthetic Peptide
TPPTPSPS

SEQ ID NO: 2685 - protein, 8 aa, synthetic construct
  REGION 1..8: note = Synthetic Peptide
PPTPSPST

SEQ ID NO: 2686 - protein, 8 aa, synthetic construct
  REGION 1..8: note = Synthetic Peptide
PTPSPSTP

SEQ ID NO: 2687 - protein, 8 aa, synthetic construct
  REGION 1..8: note = Synthetic Peptide
TPSPSTPP

SEQ ID NO: 2688 - protein, 8 aa, synthetic construct
  REGION 1..8: note = Synthetic Peptide
PSPSTPPT

SEQ ID NO: 2689 - protein, 8 aa, synthetic construct
  REGION 1..8: note = Synthetic Peptide
SPSTPPTP

SEQ ID NO: 2690 - protein, 8 aa, synthetic construct
  REGION 1..8: note = Synthetic Peptide
PSTPPTPS

SEQ ID NO: 2691 - protein, 8 aa, synthetic construct
  REGION 1..8: note = Synthetic Peptide
STPPTPSP

SEQ ID NO: 2692 - protein, 8 aa, synthetic construct
  REGION 1..8: note = Synthetic Peptide
TPPTPSPS

SEQ ID NO: 2693 - protein, 8 aa, synthetic construct
  REGION 1..8: note = Synthetic Peptide
PPTPSPSC

SEQ ID NO: 2694 - protein, 8 aa, synthetic construct
  REGION 1..8: note = Synthetic Peptide
PTPSPSCC

SEQ ID NO: 2695 - protein, 8 aa, synthetic construct
  REGION 1..8: note = Synthetic Peptide
TPSPSCCH

SEQ ID NO: 2696 - protein, 7 aa, synthetic construct
  REGION 1..7: note = Synthetic Peptide
PVPSTPP

SEQ ID NO: 2697 - protein, 7 aa, synthetic construct
  REGION 1..7: note = Synthetic Peptide
VPSTPPT

SEQ ID NO: 2698 - protein, 7 aa, synthetic construct
  REGION 1..7: note = Synthetic Peptide
PSTPPTP

SEQ ID NO: 2699 - protein, 7 aa, synthetic construct
  REGION 1..7: note = Synthetic Peptide
STPPTPS

SEQ ID NO: 2700 - protein, 7 aa, synthetic construct
  REGION 1..7: note = Synthetic Peptide
TPPTPSP

SEQ ID NO: 2701 - protein, 7 aa, synthetic construct
  REGION 1..7: note = Synthetic Peptide
PPTPSPS

SEQ ID NO: 2702 - protein, 7 aa, synthetic construct
  REGION 1..7: note = Synthetic Peptide
PTPSPST

SEQ ID NO: 2703 - protein, 7 aa, synthetic construct
  REGION 1..7: note = Synthetic Peptide
TPSPSTP

SEQ ID NO: 2704 - protein, 7 aa, synthetic construct
  REGION 1..7: note = Synthetic Peptide
PSPSTPP

SEQ ID NO: 2705 - protein, 7 aa, synthetic construct
  REGION 1..7: note = Synthetic Peptide
SPSTPPT

SEQ ID NO: 2706 - protein, 7 aa, synthetic construct
  REGION 1..7: note = Synthetic Peptide
PSTPPTP

SEQ ID NO: 2707 - protein, 7 aa, synthetic construct
  REGION 1..7: note = Synthetic Peptide
STPPTPS

SEQ ID NO: 2708 - protein, 7 aa, synthetic construct
  REGION 1..7: note = Synthetic Peptide
TPPTPSP

SEQ ID NO: 2709 - protein, 7 aa, synthetic construct
  REGION 1..7: note = Synthetic Peptide
PPTPSPS

SEQ ID NO: 2710 - protein, 7 aa, synthetic construct
  REGION 1..7: note = Synthetic Peptide
PTPSPSC

SEQ ID NO: 2711 - protein, 7 aa, synthetic construct
  REGION 1..7: note = Synthetic Peptide
TPSPSCC

SEQ ID NO: 2712 - protein, 7 aa, synthetic construct
  REGION 1..7: note = Synthetic Peptide
PSPSCCH

SEQ ID NO: 2713 - protein, 10 aa, synthetic construct
  REGION 1..10: note = Synthetic Peptide
PVPPPPPCCH

SEQ ID NO: 2714 - protein, 9 aa, synthetic construct
  REGION 1..9: note = Synthetic Peptide
PVPPPPPCC

SEQ ID NO: 2715 - protein, 9 aa, synthetic construct
  REGION 1..9: note = Synthetic Peptide
VPPPPPCCH

SEQ ID NO: 2716 - protein, 8 aa, synthetic construct
  REGION 1..8: note = Synthetic Peptide
PVPPPPPC

SEQ ID NO: 2717 - protein, 8 aa, synthetic construct
  REGION 1..8: note = Synthetic Peptide
VPPPPPCC

SEQ ID NO: 2718 - protein, 8 aa, synthetic construct
  REGION 1..8: note = Synthetic Peptide
PPPPPCCH

SEQ ID NO: 2719 - protein, 7 aa, synthetic construct
  REGION 1..7: note = Synthetic Peptide
PVPPPPP

SEQ ID NO: 2720 - protein, 7 aa, synthetic construct
  REGION 1..7: note = Synthetic Peptide
VPPPPPC

SEQ ID NO: 2721 - protein, 7 aa, synthetic construct
  REGION 1..7: note = Synthetic Peptide
PPPPPCC

SEQ ID NO: 2722 - protein, 7 aa, synthetic construct
  REGION 1..7: note = Synthetic Peptide
PPPPCCH

SEQ ID NO: 2723 - protein, 15 aa, synthetic construct
  REGION 1..15: note = Synthetic Peptide
EPKSCDKTHTCPPCP

SEQ ID NO: 2724 - protein, 14 aa, synthetic construct
  REGION 1..14: note = Synthetic Peptide
EPKSCDKTHTCPPC

SEQ ID NO: 2725 - protein, 14 aa, synthetic construct
  REGION 1..14: note = Synthetic Peptide
PKSCDKTHTCPPCP

SEQ ID NO: 2726 - protein, 13 aa, synthetic construct
  REGION 1..13: note = Synthetic Peptide
EPKSCDKTHTCPP

SEQ ID NO: 2727 - protein, 13 aa, synthetic construct
  REGION 1..13: note = Synthetic Peptide
PKSCDKTHTCPPC

SEQ ID NO: 2728 - protein, 13 aa, synthetic construct
  REGION 1..13: note = Synthetic Peptide
KSCDKTHTCPPCP

SEQ ID NO: 2729 - protein, 12 aa, synthetic construct
  REGION 1..12: note = Synthetic Peptide
EPKSCDKTHTCP

SEQ ID NO: 2730 - protein, 12 aa, synthetic construct
  REGION 1..12: note = Synthetic Peptide
PKSCDKTHTCPP

SEQ ID NO: 2731 - protein, 12 aa, synthetic construct
  REGION 1..12: note = Synthetic Peptide
KSCDKTHTCPPC

SEQ ID NO: 2732 - protein, 12 aa, synthetic construct
  REGION 1..12: note = Synthetic Peptide
SCDKTHTCPPCP

SEQ ID NO: 2733 - protein, 11 aa, synthetic construct
  REGION 1..11: note = Synthetic Peptide
EPKSCDKTHTC

SEQ ID NO: 2734 - protein, 11 aa, synthetic construct
  REGION 1..11: note = Synthetic Peptide
PKSCDKTHTCP

SEQ ID NO: 2735 - protein, 11 aa, synthetic construct
  REGION 1..11: note = Synthetic Peptide
KSCDKTHTCPP

SEQ ID NO: 2736 - protein, 11 aa, synthetic construct
  REGION 1..11: note = Synthetic Peptide
SCDKTHTCPPC

SEQ ID NO: 2737 - protein, 11 aa, synthetic construct
  REGION 1..11: note = Synthetic Peptide
CDKTHTCPPCP

SEQ ID NO: 2738 - protein, 10 aa, synthetic construct
  REGION 1..10: note = Synthetic Peptide
EPKSCDKTHT

SEQ ID NO: 2739 - protein, 10 aa, synthetic construct
  REGION 1..10: note = Synthetic Peptide
PKSCDKTHTC

SEQ ID NO: 2740 - protein, 10 aa, synthetic construct
  REGION 1..10: note = Synthetic Peptide
KSCDKTHTCP

SEQ ID NO: 2741 - protein, 10 aa, synthetic construct
  REGION 1..10: note = Synthetic Peptide
SCDKTHTCPP

SEQ ID NO: 2742 - protein, 10 aa, synthetic construct
  REGION 1..10: note = Synthetic Peptide
CDKTHTCPPC

SEQ ID NO: 2743 - protein, 10 aa, synthetic construct
  REGION 1..10: note = Synthetic Peptide
DKTHTCPPCP

SEQ ID NO: 2744 - protein, 9 aa, synthetic construct
  REGION 1..9: note = Synthetic Peptide
EPKSCDKTH

SEQ ID NO: 2745 - protein, 9 aa, synthetic construct
  REGION 1..9: note = Synthetic Peptide
PKSCDKTHT

SEQ ID NO: 2746 - protein, 9 aa, synthetic construct
  REGION 1..9: note = Synthetic Peptide
KSCDKTHTC

SEQ ID NO: 2747 - protein, 9 aa, synthetic construct
  REGION 1..9: note = Synthetic Peptide
SCDKTHTCP

SEQ ID NO: 2748 - protein, 9 aa, synthetic construct
  REGION 1..9: note = Synthetic Peptide
CDKTHTCPP

SEQ ID NO: 2749 - protein, 9 aa, synthetic construct
  REGION 1..9: note = Synthetic Peptide
DKTHTCPPC

SEQ ID NO: 2750 - protein, 9 aa, synthetic construct
  REGION 1..9: note = Synthetic Peptide
KTHTCPPCP

SEQ ID NO: 2751 - protein, 8 aa, synthetic construct
  REGION 1..8: note = Synthetic Peptide
EPKSCDKT

SEQ ID NO: 2752 - protein, 8 aa, synthetic construct
  REGION 1..8: note = Synthetic Peptide
PKSCDKTH

SEQ ID NO: 2753 - protein, 8 aa, synthetic construct
  REGION 1..8: note = Synthetic Peptide
KSCDKTHT

SEQ ID NO: 2754 - protein, 8 aa, synthetic construct
  REGION 1..8: note = Synthetic Peptide
SCDKTHTC

SEQ ID NO: 2755 - protein, 8 aa, synthetic construct
  REGION 1..8: note = Synthetic Peptide
CDKTHTCP

SEQ ID NO: 2756 - protein, 8 aa, synthetic construct
  REGION 1..8: note = Synthetic Peptide
DKTHTCPP

SEQ ID NO: 2757 - protein, 8 aa, synthetic construct
  REGION 1..8: note = Synthetic Peptide
KTHTCPPC

SEQ ID NO: 2758 - protein, 8 aa, synthetic construct
  REGION 1..8: note = Synthetic Peptide
THTCPPCP

SEQ ID NO: 2759 - protein, 7 aa, synthetic construct
  REGION 1..7: note = Synthetic Peptide
EPKSCDK

SEQ ID NO: 2760 - protein, 7 aa, synthetic construct
  REGION 1..7: note = Synthetic Peptide
PKSCDKT

SEQ ID NO: 2761 - protein, 7 aa, synthetic construct
  REGION 1..7: note = Synthetic Peptide
KSCDKTH

SEQ ID NO: 2762 - protein, 7 aa, synthetic construct
  REGION 1..7: note = Synthetic Peptide
SCDKTHT

SEQ ID NO: 2763 - protein, 7 aa, synthetic construct
  REGION 1..7: note = Synthetic Peptide
CDKTHTC

SEQ ID NO: 2764 - protein, 7 aa, synthetic construct
  REGION 1..7: note = Synthetic Peptide
DKTHTCP

SEQ ID NO: 2765 - protein, 7 aa, synthetic construct
  REGION 1..7: note = Synthetic Peptide
KTHTCPP

SEQ ID NO: 2766 - protein, 7 aa, synthetic construct
  REGION 1..7: note = Synthetic Peptide
THTCPPC

SEQ ID NO: 2767 - protein, 7 aa, synthetic construct
  REGION 1..7: note = Synthetic Peptide
HTCPPCP

SEQ ID NO: 2768 - protein, 11 aa, synthetic construct
  REGION 1..11: note = Synthetic Peptide
ERKCCVECPPC

SEQ ID NO: 2769 - protein, 10 aa, synthetic construct
  REGION 1..10: note = Synthetic Peptide
RKCCVECPPC

SEQ ID NO: 2770 - protein, 10 aa, synthetic construct
  REGION 1..10: note = Synthetic Peptide
ERKCCVECPP

SEQ ID NO: 2771 - protein, 9 aa, synthetic construct
  REGION 1..9: note = Synthetic Peptide
ERKCCVECP

SEQ ID NO: 2772 - protein, 9 aa, synthetic construct
  REGION 1..9: note = Synthetic Peptide
RKCCVECPP

SEQ ID NO: 2773 - protein, 9 aa, synthetic construct
  REGION 1..9: note = Synthetic Peptide
KCCVECPPC

SEQ ID NO: 2774 - protein, 8 aa, synthetic construct
  REGION 1..8: note = Synthetic Peptide
ERKCCVEC

SEQ ID NO: 2775 - protein, 8 aa, synthetic construct
  REGION 1..8: note = Synthetic Peptide
RKCCVECP

SEQ ID NO: 2776 - protein, 8 aa, synthetic construct
  REGION 1..8: note = Synthetic Peptide
KCCVECPP

SEQ ID NO: 2777 - protein, 8 aa, synthetic construct
  REGION 1..8: note = Synthetic Peptide
CCVECPPC

SEQ ID NO: 2778 - protein, 7 aa, synthetic construct
  REGION 1..7: note = Synthetic Peptide
ERKCCVE

SEQ ID NO: 2779 - protein, 7 aa, synthetic construct
  REGION 1..7: note = Synthetic Peptide
RKCCVEC

SEQ ID NO: 2780 - protein, 7 aa, synthetic construct
  REGION 1..7: note = Synthetic Peptide
KCCVECP

SEQ ID NO: 2781 - protein, 7 aa, synthetic construct
  REGION 1..7: note = Synthetic Peptide
CCVECPP

SEQ ID NO: 2782 - protein, 7 aa, synthetic construct
  REGION 1..7: note = Synthetic Peptide
CVECPPC

SEQ ID NO: 2783 - protein, 25 aa, synthetic construct
  REGION 1..25: note = Synthetic Peptide
PLPVIAELPPKVSVFVPPRDGFFGN

SEQ ID NO: 2784 - protein, 25 aa, synthetic construct
  REGION 1..25: note = Synthetic Peptide
LPVIAELPPKVSVFVPPRDGFFGNP

SEQ ID NO: 2785 - protein, 24 aa, synthetic construct
  REGION 1..24: note = Synthetic Peptide
PLPVIAELPPKVSVFVPPRDGFFG

SEQ ID NO: 2786 - protein, 24 aa, synthetic construct
  REGION 1..24: note = Synthetic Peptide
LPVIAELPPKVSVFVPPRDGFFGN

SEQ ID NO: 2787 - protein, 24 aa, synthetic construct
  REGION 1..24: note = Synthetic Peptide
PVIAELPPKVSVFVPPRDGFFGNP

SEQ ID NO: 2788 - protein, 23 aa, synthetic construct
  REGION 1..23: note = Synthetic Peptide
PLPVIAELPPKVSVFVPPRDGFF

SEQ ID NO: 2789 - protein, 23 aa, synthetic construct
  REGION 1..23: note = Synthetic Peptide
LPVIAELPPKVSVFVPPRDGFFG

SEQ ID NO: 2790 - protein, 23 aa, synthetic construct
  REGION 1..23: note = Synthetic Peptide
PVIAELPPKVSVFVPPRDGFFGN

SEQ ID NO: 2791 - protein, 23 aa, synthetic construct
  REGION 1..23: note = Synthetic Peptide
VIAELPPKVSVFVPPRDGFFGNP

SEQ ID NO: 2792 - protein, 22 aa, synthetic construct
  REGION 1..22: note = Synthetic Peptide
PLPVIAELPPKVSVFVPPRDGF

SEQ ID NO: 2793 - protein, 22 aa, synthetic construct
  REGION 1..22: note = Synthetic Peptide
LPVIAELPPKVSVFVPPRDGFF

SEQ ID NO: 2794 - protein, 22 aa, synthetic construct
  REGION 1..22: note = Synthetic Peptide
PVIAELPPKVSVFVPPRDGFFG

SEQ ID NO: 2795 - protein, 22 aa, synthetic construct
  REGION 1..22: note = Synthetic Peptide
VIAELPPKVSVFVPPRDGFFGN

SEQ ID NO: 2796 - protein, 22 aa, synthetic construct
  REGION 1..22: note = Synthetic Peptide
IAELPPKVSVFVPPRDGFFGNP

SEQ ID NO: 2797 - protein, 21 aa, synthetic construct
  REGION 1..21: note = Synthetic Peptide
PLPVIAELPPKVSVFVPPRDG

SEQ ID NO: 2798 - protein, 21 aa, synthetic construct
  REGION 1..21: note = Synthetic Peptide
LPVIAELPPKVSVFVPPRDGF

SEQ ID NO: 2799 - protein, 21 aa, synthetic construct
  REGION 1..21: note = Synthetic Peptide
PVIAELPPKVSVFVPPRDGFF

SEQ ID NO: 2800 - protein, 21 aa, synthetic construct
  REGION 1..21: note = Synthetic Peptide
VIAELPPKVSVFVPPRDGFFG

SEQ ID NO: 2801 - protein, 21 aa, synthetic construct
  REGION 1..21: note = Synthetic Peptide
IAELPPKVSVFVPPRDGFFGN

SEQ ID NO: 2802 - protein, 21 aa, synthetic construct
  REGION 1..21: note = Synthetic Peptide
AELPPKVSVFVPPRDGFFGNP

SEQ ID NO: 2803 - protein, 20 aa, synthetic construct
  REGION 1..20: note = Synthetic Peptide
PLPVIAELPPKVSVFVPPRD

SEQ ID NO: 2804 - protein, 20 aa, synthetic construct
  REGION 1..20: note = Synthetic Peptide
LPVIAELPPKVSVFVPPRDG

SEQ ID NO: 2805 - protein, 20 aa, synthetic construct
  REGION 1..20: note = Synthetic Peptide
PVIAELPPKVSVFVPPRDGF

SEQ ID NO: 2806 - protein, 20 aa, synthetic construct
  REGION 1..20: note = Synthetic Peptide
VIAELPPKVSVFVPPRDGFF

SEQ ID NO: 2807 - protein, 20 aa, synthetic construct
  REGION 1..20: note = Synthetic Peptide
IAELPPKVSVFVPPRDGFFG

SEQ ID NO: 2808 - protein, 20 aa, synthetic construct
  REGION 1..20: note = Synthetic Peptide
AELPPKVSVFVPPRDGFFGN

SEQ ID NO: 2809 - protein, 20 aa, synthetic construct
  REGION 1..20: note = Synthetic Peptide
ELPPKVSVFVPPRDGFFGNP

SEQ ID NO: 2810 - protein, 19 aa, synthetic construct
  REGION 1..19: note = Synthetic Peptide
PLPVIAELPPKVSVFVPPR

SEQ ID NO: 2811 - protein, 19 aa, synthetic construct
  REGION 1..19: note = Synthetic Peptide
LPVIAELPPKVSVFVPPRD

SEQ ID NO: 2812 - protein, 19 aa, synthetic construct
  REGION 1..19: note = Synthetic Peptide
PVIAELPPKVSVFVPPRDG

SEQ ID NO: 2813 - protein, 62 aa, synthetic construct
  REGION 1..62: note = Synthetic Peptide
ELKTPLGDTTHTCPRCPEPKSCDTPPPCPRCPEPKSCDTPPPCPRCPEPKSCDTPPPCPRCP

SEQ ID NO: 2814 - protein, 61 aa, synthetic construct
  REGION 1..61: note = Synthetic Peptide
ELKTPLGDTTHTCPRCPEPKSCDTPPPCPRCPEPKSCDTPPPCPRCPEPKSCDTPPPCPRC

SEQ ID NO: 2815 - protein, 61 aa, synthetic construct
  REGION 1..61: note = Synthetic Peptide
LKTPLGDTTHTCPRCPEPKSCDTPPPCPRCPEPKSCDTPPPCPRCPEPKSCDTPPPCPRCP

SEQ ID NO: 2816 - protein, 60 aa, synthetic construct
  REGION 1..60: note = Synthetic Peptide
ELKTPLGDTTHTCPRCPEPKSCDTPPPCPRCPEPKSCDTPPPCPRCPEPKSCDTPPPCPR

SEQ ID NO: 2817 - protein, 60 aa, synthetic construct
  REGION 1..60: note = Synthetic Peptide
LKTPLGDTTHTCPRCPEPKSCDTPPPCPRCPEPKSCDTPPPCPRCPEPKSCDTPPPCPRC

SEQ ID NO: 2818 - protein, 60 aa, synthetic construct
  REGION 1..60: note = Synthetic Peptide
KTPLGDTTHTCPRCPEPKSCDTPPPCPRCPEPKSCDTPPPCPRCPEPKSCDTPPPCPRCP

SEQ ID NO: 2819 - protein, 59 aa, synthetic construct
  REGION 1..59: note = Synthetic Peptide
ELKTPLGDTTHTCPRCPEPKSCDTPPPCPRCPEPKSCDTPPPCPRCPEPKSCDTPPPCP

SEQ ID NO: 2820 - protein, 59 aa, synthetic construct
  REGION 1..59: note = Synthetic Peptide
LKTPLGDTTHTCPRCPEPKSCDTPPPCPRCPEPKSCDTPPPCPRCPEPKSCDTPPPCPR

SEQ ID NO: 2821 - protein, 59 aa, synthetic construct
  REGION 1..59: note = Synthetic Peptide
KTPLGDTTHTCPRCPEPKSCDTPPPCPRCPEPKSCDTPPPCPRCPEPKSCDTPPPCPRC

SEQ ID NO: 2822 - protein, 59 aa, synthetic construct
  REGION 1..59: note = Synthetic Peptide
TPLGDTTHTCPRCPEPKSCDTPPPCPRCPEPKSCDTPPPCPRCPEPKSCDTPPPCPRCP

SEQ ID NO: 2823 - protein, 58 aa, synthetic construct
  REGION 1..58: note = Synthetic Peptide
ELKTPLGDTTHTCPRCPEPKSCDTPPPCPRCPEPKSCDTPPPCPRCPEPKSCDTPPPC

SEQ ID NO: 2824 - protein, 58 aa, synthetic construct
  REGION 1..58: note = Synthetic Peptide
LKTPLGDTTHTCPRCPEPKSCDTPPPCPRCPEPKSCDTPPPCPRCPEPKSCDTPPPCP

SEQ ID NO: 2825 - protein, 58 aa, synthetic construct
  REGION 1..58: note = Synthetic Peptide
KTPLGDTTHTCPRCPEPKSCDTPPPCPRCPEPKSCDTPPPCPRCPEPKSCDTPPPCPR

SEQ ID NO: 2826 - protein, 58 aa, synthetic construct
  REGION 1..58: note = Synthetic Peptide
TPLGDTTHTCPRCPEPKSCDTPPPCPRCPEPKSCDTPPPCPRCPEPKSCDTPPPCPRC

SEQ ID NO: 2827 - protein, 58 aa, synthetic construct
  REGION 1..58: note = Synthetic Peptide
PLGDTTHTCPRCPEPKSCDTPPPCPRCPEPKSCDTPPPCPRCPEPKSCDTPPPCPRCP

SEQ ID NO: 2828 - protein, 57 aa, synthetic construct
  REGION 1..57: note = Synthetic Peptide
ELKTPLGDTTHTCPRCPEPKSCDTPPPCPRCPEPKSCDTPPPCPRCPEPKSCDTPPP

SEQ ID NO: 2829 - protein, 57 aa, synthetic construct
  REGION 1..57: note = Synthetic Peptide
LKTPLGDTTHTCPRCPEPKSCDTPPPCPRCPEPKSCDTPPPCPRCPEPKSCDTPPPC

SEQ ID NO: 2830 - protein, 57 aa, synthetic construct
  REGION 1..57: note = Synthetic Peptide
KTPLGDTTHTCPRCPEPKSCDTPPPCPRCPEPKSCDTPPPCPRCPEPKSCDTPPPCP

SEQ ID NO: 2831 - protein, 57 aa, synthetic construct
  REGION 1..57: note = Synthetic Peptide
TPLGDTTHTCPRCPEPKSCDTPPPCPRCPEPKSCDTPPPCPRCPEPKSCDTPPPCPR

SEQ ID NO: 2832 - protein, 57 aa, synthetic construct
  REGION 1..57: note = Synthetic Peptide
PLGDTTHTCPRCPEPKSCDTPPPCPRCPEPKSCDTPPPCPRCPEPKSCDTPPPCPRC

SEQ ID NO: 2833 - protein, 57 aa, synthetic construct
  REGION 1..57: note = Synthetic Peptide
LGDTTHTCPRCPEPKSCDTPPPCPRCPEPKSCDTPPPCPRCPEPKSCDTPPPCPRCP

SEQ ID NO: 2834 - protein, 56 aa, synthetic construct
  REGION 1..56: note = Synthetic Peptide
ELKTPLGDTTHTCPRCPEPKSCDTPPPCPRCPEPKSCDTPPPCPRCPEPKSCDTPP

SEQ ID NO: 2835 - protein, 56 aa, synthetic construct
  REGION 1..56: note = Synthetic Peptide
LKTPLGDTTHTCPRCPEPKSCDTPPPCPRCPEPKSCDTPPPCPRCPEPKSCDTPPP

SEQ ID NO: 2836 - protein, 56 aa, synthetic construct
  REGION 1..56: note = Synthetic Peptide
KTPLGDTTHTCPRCPEPKSCDTPPPCPRCPEPKSCDTPPPCPRCPEPKSCDTPPPC

SEQ ID NO: 2837 - protein, 56 aa, synthetic construct
  REGION 1..56: note = Synthetic Peptide
TPLGDTTHTCPRCPEPKSCDTPPPCPRCPEPKSCDTPPPCPRCPEPKSCDTPPPCP

SEQ ID NO: 2838 - protein, 56 aa, synthetic construct
  REGION 1..56: note = Synthetic Peptide
PLGDTTHTCPRCPEPKSCDTPPPCPRCPEPKSCDTPPPCPRCPEPKSCDTPPPCPR

SEQ ID NO: 2839 - protein, 56 aa, synthetic construct
  REGION 1..56: note = Synthetic Peptide
LGDTTHTCPRCPEPKSCDTPPPCPRCPEPKSCDTPPPCPRCPEPKSCDTPPPCPRC

SEQ ID NO: 2840 - protein, 56 aa, synthetic construct
  REGION 1..56: note = Synthetic Peptide
GDTTHTCPRCPEPKSCDTPPPCPRCPEPKSCDTPPPCPRCPEPKSCDTPPPCPRCP

SEQ ID NO: 2841 - protein, 55 aa, synthetic construct
  REGION 1..55: note = Synthetic Peptide
ELKTPLGDTTHTCPRCPEPKSCDTPPPCPRCPEPKSCDTPPPCPRCPEPKSCDTP

SEQ ID NO: 2842 - protein, 55 aa, synthetic construct
  REGION 1..55: note = Synthetic Peptide
LKTPLGDTTHTCPRCPEPKSCDTPPPCPRCPEPKSCDTPPPCPRCPEPKSCDTPP

SEQ ID NO: 2843 - protein, 55 aa, synthetic construct
  REGION 1..55: note = Synthetic Peptide
KTPLGDTTHTCPRCPEPKSCDTPPPCPRCPEPKSCDTPPPCPRCPEPKSCDTPPP

SEQ ID NO: 2844 - protein, 55 aa, synthetic construct
  REGION 1..55: note = Synthetic Peptide
TPLGDTTHTCPRCPEPKSCDTPPPCPRCPEPKSCDTPPPCPRCPEPKSCDTPPPC

SEQ ID NO: 2845 - protein, 55 aa, synthetic construct
  REGION 1..55: note = Synthetic Peptide
PLGDTTHTCPRCPEPKSCDTPPPCPRCPEPKSCDTPPPCPRCPEPKSCDTPPPCP

SEQ ID NO: 2846 - protein, 55 aa, synthetic construct
  REGION 1..55: note = Synthetic Peptide
LGDTTHTCPRCPEPKSCDTPPPCPRCPEPKSCDTPPPCPRCPEPKSCDTPPPCPR

SEQ ID NO: 2847 - protein, 55 aa, synthetic construct
  REGION 1..55: note = Synthetic Peptide
GDTTHTCPRCPEPKSCDTPPPCPRCPEPKSCDTPPPCPRCPEPKSCDTPPPCPRC

SEQ ID NO: 2848 - protein, 55 aa, synthetic construct
  REGION 1..55: note = Synthetic Peptide
DTTHTCPRCPEPKSCDTPPPCPRCPEPKSCDTPPPCPRCPEPKSCDTPPPCPRCP

SEQ ID NO: 2849 - protein, 54 aa, synthetic construct
  REGION 1..54: note = Synthetic Peptide
ELKTPLGDTTHTCPRCPEPKSCDTPPPCPRCPEPKSCDTPPPCPRCPEPKSCDT

SEQ ID NO: 2850 - protein, 54 aa, synthetic construct
  REGION 1..54: note = Synthetic Peptide
LKTPLGDTTHTCPRCPEPKSCDTPPPCPRCPEPKSCDTPPPCPRCPEPKSCDTP

SEQ ID NO: 2851 - protein, 54 aa, synthetic construct
  REGION 1..54: note = Synthetic Peptide
KTPLGDTTHTCPRCPEPKSCDTPPPCPRCPEPKSCDTPPPCPRCPEPKSCDTPP

SEQ ID NO: 2852 - protein, 54 aa, synthetic construct
  REGION 1..54: note = Synthetic Peptide
TPLGDTTHTCPRCPEPKSCDTPPPCPRCPEPKSCDTPPPCPRCPEPKSCDTPPP

SEQ ID NO: 2853 - protein, 54 aa, synthetic construct
  REGION 1..54: note = Synthetic Peptide
PLGDTTHTCPRCPEPKSCDTPPPCPRCPEPKSCDTPPPCPRCPEPKSCDTPPPC

SEQ ID NO: 2854 - protein, 54 aa, synthetic construct
  REGION 1..54: note = Synthetic Peptide
LGDTTHTCPRCPEPKSCDTPPPCPRCPEPKSCDTPPPCPRCPEPKSCDTPPPCP

SEQ ID NO: 2855 - protein, 54 aa, synthetic construct
  REGION 1..54: note = Synthetic Peptide
GDTTHTCPRCPEPKSCDTPPPCPRCPEPKSCDTPPPCPRCPEPKSCDTPPPCPR

SEQ ID NO: 2856 - protein, 54 aa, synthetic construct
  REGION 1..54: note = Synthetic Peptide
DTTHTCPRCPEPKSCDTPPPCPRCPEPKSCDTPPPCPRCPEPKSCDTPPPCPRC

SEQ ID NO: 2857 - protein, 54 aa, synthetic construct
  REGION 1..54: note = Synthetic Peptide
TTHTCPRCPEPKSCDTPPPCPRCPEPKSCDTPPPCPRCPEPKSCDTPPPCPRCP

SEQ ID NO: 2858 - protein, 53 aa, synthetic construct
  REGION 1..53: note = Synthetic Peptide
ELKTPLGDTTHTCPRCPEPKSCDTPPPCPRCPEPKSCDTPPPCPRCPEPKSCD

SEQ ID NO: 2859 - protein, 53 aa, synthetic construct
  REGION 1..53: note = Synthetic Peptide
LKTPLGDTTHTCPRCPEPKSCDTPPPCPRCPEPKSCDTPPPCPRCPEPKSCDT

SEQ ID NO: 2860 - protein, 53 aa, synthetic construct
  REGION 1..53: note = Synthetic Peptide
KTPLGDTTHTCPRCPEPKSCDTPPPCPRCPEPKSCDTPPPCPRCPEPKSCDTP

SEQ ID NO: 2861 - protein, 53 aa, synthetic construct
  REGION 1..53: note = Synthetic Peptide
TPLGDTTHTCPRCPEPKSCDTPPPCPRCPEPKSCDTPPPCPRCPEPKSCDTPP

SEQ ID NO: 2862 - protein, 53 aa, synthetic construct
  REGION 1..53: note = Synthetic Peptide
PLGDTTHTCPRCPEPKSCDTPPPCPRCPEPKSCDTPPPCPRCPEPKSCDTPPP

SEQ ID NO: 2863 - protein, 53 aa, synthetic construct
  REGION 1..53: note = Synthetic Peptide
LGDTTHTCPRCPEPKSCDTPPPCPRCPEPKSCDTPPPCPRCPEPKSCDTPPPC

SEQ ID NO: 2864 - protein, 53 aa, synthetic construct
  REGION 1..53: note = Synthetic Peptide
GDTTHTCPRCPEPKSCDTPPPCPRCPEPKSCDTPPPCPRCPEPKSCDTPPPCP

SEQ ID NO: 2865 - protein, 53 aa, synthetic construct
  REGION 1..53: note = Synthetic Peptide
DTTHTCPRCPEPKSCDTPPPCPRCPEPKSCDTPPPCPRCPEPKSCDTPPPCPR

SEQ ID NO: 2866 - protein, 53 aa, synthetic construct
  REGION 1..53: note = Synthetic Peptide
TTHTCPRCPEPKSCDTPPPCPRCPEPKSCDTPPPCPRCPEPKSCDTPPPCPRC

SEQ ID NO: 2867 - protein, 53 aa, synthetic construct
  REGION 1..53: note = Synthetic Peptide
THTCPRCPEPKSCDTPPPCPRCPEPKSCDTPPPCPRCPEPKSCDTPPPCPRCP

SEQ ID NO: 2868 - protein, 52 aa, synthetic construct
  REGION 1..52: note = Synthetic Peptide
ELKTPLGDTTHTCPRCPEPKSCDTPPPCPRCPEPKSCDTPPPCPRCPEPKSC

SEQ ID NO: 2869 - protein, 52 aa, synthetic construct
  REGION 1..52: note = Synthetic Peptide
LKTPLGDTTHTCPRCPEPKSCDTPPPCPRCPEPKSCDTPPPCPRCPEPKSCD

SEQ ID NO: 2870 - protein, 52 aa, synthetic construct
  REGION 1..52: note = Synthetic Peptide
KTPLGDTTHTCPRCPEPKSCDTPPPCPRCPEPKSCDTPPPCPRCPEPKSCDT

SEQ ID NO: 2871 - protein, 52 aa, synthetic construct
  REGION 1..52: note = Synthetic Peptide
TPLGDTTHTCPRCPEPKSCDTPPPCPRCPEPKSCDTPPPCPRCPEPKSCDTP

SEQ ID NO: 2872 - protein, 52 aa, synthetic construct
  REGION 1..52: note = Synthetic Peptide
PLGDTTHTCPRCPEPKSCDTPPPCPRCPEPKSCDTPPPCPRCPEPKSCDTPP

SEQ ID NO: 2873 - protein, 52 aa, synthetic construct
  REGION 1..52: note = Synthetic Peptide
LGDTTHTCPRCPEPKSCDTPPPCPRCPEPKSCDTPPPCPRCPEPKSCDTPPP

SEQ ID NO: 2874 - protein, 52 aa, synthetic construct
  REGION 1..52: note = Synthetic Peptide
GDTTHTCPRCPEPKSCDTPPPCPRCPEPKSCDTPPPCPRCPEPKSCDTPPPC

SEQ ID NO: 2875 - protein, 52 aa, synthetic construct
  REGION 1..52: note = Synthetic Peptide
DTTHTCPRCPEPKSCDTPPPCPRCPEPKSCDTPPPCPRCPEPKSCDTPPPCP

SEQ ID NO: 2876 - protein, 52 aa, synthetic construct
  REGION 1..52: note = Synthetic Peptide
TTHTCPRCPEPKSCDTPPPCPRCPEPKSCDTPPPCPRCPEPKSCDTPPPCPR

SEQ ID NO: 2877 - protein, 52 aa, synthetic construct
  REGION 1..52: note = Synthetic Peptide
THTCPRCPEPKSCDTPPPCPRCPEPKSCDTPPPCPRCPEPKSCDTPPPCPRC

SEQ ID NO: 2878 - protein, 52 aa, synthetic construct
  REGION 1..52: note = Synthetic Peptide
HTCPRCPEPKSCDTPPPCPRCPEPKSCDTPPPCPRCPEPKSCDTPPPCPRCP

SEQ ID NO: 2879 - protein, 51 aa, synthetic construct
  REGION 1..51: note = Synthetic Peptide
ELKTPLGDTTHTCPRCPEPKSCDTPPPCPRCPEPKSCDTPPPCPRCPEPKS

SEQ ID NO: 2880 - protein, 51 aa, synthetic construct
  REGION 1..51: note = Synthetic Peptide
LKTPLGDTTHTCPRCPEPKSCDTPPPCPRCPEPKSCDTPPPCPRCPEPKSC

SEQ ID NO: 2881 - protein, 51 aa, synthetic construct
  REGION 1..51: note = Synthetic Peptide
KTPLGDTTHTCPRCPEPKSCDTPPPCPRCPEPKSCDTPPPCPRCPEPKSCD

SEQ ID NO: 2882 - protein, 51 aa, synthetic construct
  REGION 1..51: note = Synthetic Peptide
TPLGDTTHTCPRCPEPKSCDTPPPCPRCPEPKSCDTPPPCPRCPEPKSCDT

SEQ ID NO: 2883 - protein, 51 aa, synthetic construct
  REGION 1..51: note = Synthetic Peptide
PLGDTTHTCPRCPEPKSCDTPPPCPRCPEPKSCDTPPPCPRCPEPKSCDTP

SEQ ID NO: 2884 - protein, 51 aa, synthetic construct
  REGION 1..51: note = Synthetic Peptide
LGDTTHTCPRCPEPKSCDTPPPCPRCPEPKSCDTPPPCPRCPEPKSCDTPP

SEQ ID NO: 2885 - protein, 51 aa, synthetic construct
  REGION 1..51: note = Synthetic Peptide
GDTTHTCPRCPEPKSCDTPPPCPRCPEPKSCDTPPPCPRCPEPKSCDTPPP

SEQ ID NO: 2886 - protein, 51 aa, synthetic construct
  REGION 1..51: note = Synthetic Peptide
DTTHTCPRCPEPKSCDTPPPCPRCPEPKSCDTPPPCPRCPEPKSCDTPPPC

SEQ ID NO: 2887 - protein, 51 aa, synthetic construct
  REGION 1..51: note = Synthetic Peptide
TTHTCPRCPEPKSCDTPPPCPRCPEPKSCDTPPPCPRCPEPKSCDTPPPCP

SEQ ID NO: 2888 - protein, 51 aa, synthetic construct
  REGION 1..51: note = Synthetic Peptide
THTCPRCPEPKSCDTPPPCPRCPEPKSCDTPPPCPRCPEPKSCDTPPPCPR

SEQ ID NO: 2889 - protein, 51 aa, synthetic construct
  REGION 1..51: note = Synthetic Peptide
HTCPRCPEPKSCDTPPPCPRCPEPKSCDTPPPCPRCPEPKSCDTPPPCPRC

SEQ ID NO: 2890 - protein, 51 aa, synthetic construct
  REGION 1..51: note = Synthetic Peptide
TCPRCPEPKSCDTPPPCPRCPEPKSCDTPPPCPRCPEPKSCDTPPPCPRCP

SEQ ID NO: 2891 - protein, 50 aa, synthetic construct
  REGION 1..50: note = Synthetic Peptide
ELKTPLGDTTHTCPRCPEPKSCDTPPPCPRCPEPKSCDTPPPCPRCPEPK

SEQ ID NO: 2892 - protein, 50 aa, synthetic construct
  REGION 1..50: note = Synthetic Peptide
LKTPLGDTTHTCPRCPEPKSCDTPPPCPRCPEPKSCDTPPPCPRCPEPKS

SEQ ID NO: 2893 - protein, 50 aa, synthetic construct
  REGION 1..50: note = Synthetic Peptide
KTPLGDTTHTCPRCPEPKSCDTPPPCPRCPEPKSCDTPPPCPRCPEPKSC

SEQ ID NO: 2894 - protein, 50 aa, synthetic construct
  REGION 1..50: note = Synthetic Peptide
TPLGDTTHTCPRCPEPKSCDTPPPCPRCPEPKSCDTPPPCPRCPEPKSCD

SEQ ID NO: 2895 - protein, 50 aa, synthetic construct
  REGION 1..50: note = Synthetic Peptide
PLGDTTHTCPRCPEPKSCDTPPPCPRCPEPKSCDTPPPCPRCPEPKSCDT

SEQ ID NO: 2896 - protein, 50 aa, synthetic construct
  REGION 1..50: note = Synthetic Peptide
LGDTTHTCPRCPEPKSCDTPPPCPRCPEPKSCDTPPPCPRCPEPKSCDTP

SEQ ID NO: 2897 - protein, 50 aa, synthetic construct
  REGION 1..50: note = Synthetic Peptide
GDTTHTCPRCPEPKSCDTPPPCPRCPEPKSCDTPPPCPRCPEPKSCDTPP

SEQ ID NO: 2898 - protein, 50 aa, synthetic construct
  REGION 1..50: note = Synthetic Peptide
DTTHTCPRCPEPKSCDTPPPCPRCPEPKSCDTPPPCPRCPEPKSCDTPPP

SEQ ID NO: 2899 - protein, 50 aa, synthetic construct
  REGION 1..50: note = Synthetic Peptide
TTHTCPRCPEPKSCDTPPPCPRCPEPKSCDTPPPCPRCPEPKSCDTPPPC

SEQ ID NO: 2900 - protein, 50 aa, synthetic construct
  REGION 1..50: note = Synthetic Peptide
THTCPRCPEPKSCDTPPPCPRCPEPKSCDTPPPCPRCPEPKSCDTPPPCP

SEQ ID NO: 2901 - protein, 50 aa, synthetic construct
  REGION 1..50: note = Synthetic Peptide
HTCPRCPEPKSCDTPPPCPRCPEPKSCDTPPPCPRCPEPKSCDTPPPCPR

SEQ ID NO: 2902 - protein, 50 aa, synthetic construct
  REGION 1..50: note = Synthetic Peptide
TCPRCPEPKSCDTPPPCPRCPEPKSCDTPPPCPRCPEPKSCDTPPPCPRC

SEQ ID NO: 2903 - protein, 50 aa, synthetic construct
  REGION 1..50: note = Synthetic Peptide
CPRCPEPKSCDTPPPCPRCPEPKSCDTPPPCPRCPEPKSCDTPPPCPRCP

SEQ ID NO: 2904 - protein, 49 aa, synthetic construct
  REGION 1..49: note = Synthetic Peptide
ELKTPLGDTTHTCPRCPEPKSCDTPPPCPRCPEPKSCDTPPPCPRCPEP

SEQ ID NO: 2905 - protein, 49 aa, synthetic construct
  REGION 1..49: note = Synthetic Peptide
LKTPLGDTTHTCPRCPEPKSCDTPPPCPRCPEPKSCDTPPPCPRCPEPK

SEQ ID NO: 2906 - protein, 49 aa, synthetic construct
  REGION 1..49: note = Synthetic Peptide
KTPLGDTTHTCPRCPEPKSCDTPPPCPRCPEPKSCDTPPPCPRCPEPKS

SEQ ID NO: 2907 - protein, 49 aa, synthetic construct
  REGION 1..49: note = Synthetic Peptide
TPLGDTTHTCPRCPEPKSCDTPPPCPRCPEPKSCDTPPPCPRCPEPKSC

SEQ ID NO: 2908 - protein, 49 aa, synthetic construct
  REGION 1..49: note = Synthetic Peptide
PLGDTTHTCPRCPEPKSCDTPPPCPRCPEPKSCDTPPPCPRCPEPKSCD

SEQ ID NO: 2909 - protein, 49 aa, synthetic construct
  REGION 1..49: note = Synthetic Peptide
LGDTTHTCPRCPEPKSCDTPPPCPRCPEPKSCDTPPPCPRCPEPKSCDT

SEQ ID NO: 2910 - protein, 49 aa, synthetic construct
  REGION 1..49: note = Synthetic Peptide
GDTTHTCPRCPEPKSCDTPPPCPRCPEPKSCDTPPPCPRCPEPKSCDTP

SEQ ID NO: 2911 - protein, 49 aa, synthetic construct
  REGION 1..49: note = Synthetic Peptide
DTTHTCPRCPEPKSCDTPPPCPRCPEPKSCDTPPPCPRCPEPKSCDTPP

SEQ ID NO: 2912 - protein, 49 aa, synthetic construct
  REGION 1..49: note = Synthetic Peptide
TTHTCPRCPEPKSCDTPPPCPRCPEPKSCDTPPPCPRCPEPKSCDTPPP

SEQ ID NO: 2913 - protein, 49 aa, synthetic construct
  REGION 1..49: note = Synthetic Peptide
THTCPRCPEPKSCDTPPPCPRCPEPKSCDTPPPCPRCPEPKSCDTPPPC

SEQ ID NO: 2914 - protein, 49 aa, synthetic construct
  REGION 1..49: note = Synthetic Peptide
HTCPRCPEPKSCDTPPPCPRCPEPKSCDTPPPCPRCPEPKSCDTPPPCP

SEQ ID NO: 2915 - protein, 49 aa, synthetic construct
  REGION 1..49: note = Synthetic Peptide
TCPRCPEPKSCDTPPPCPRCPEPKSCDTPPPCPRCPEPKSCDTPPPCPR

SEQ ID NO: 2916 - protein, 49 aa, synthetic construct
  REGION 1..49: note = Synthetic Peptide
CPRCPEPKSCDTPPPCPRCPEPKSCDTPPPCPRCPEPKSCDTPPPCPRC

SEQ ID NO: 2917 - protein, 49 aa, synthetic construct
  REGION 1..49: note = Synthetic Peptide
PRCPEPKSCDTPPPCPRCPEPKSCDTPPPCPRCPEPKSCDTPPPCPRCP

SEQ ID NO: 2918 - protein, 48 aa, synthetic construct
  REGION 1..48: note = Synthetic Peptide
ELKTPLGDTTHTCPRCPEPKSCDTPPPCPRCPEPKSCDTPPPCPRCPE

SEQ ID NO: 2919 - protein, 48 aa, synthetic construct
  REGION 1..48: note = Synthetic Peptide
LKTPLGDTTHTCPRCPEPKSCDTPPPCPRCPEPKSCDTPPPCPRCPEP

SEQ ID NO: 2920 - protein, 48 aa, synthetic construct
  REGION 1..48: note = Synthetic Peptide
KTPLGDTTHTCPRCPEPKSCDTPPPCPRCPEPKSCDTPPPCPRCPEPK

SEQ ID NO: 2921 - protein, 48 aa, synthetic construct
  REGION 1..48: note = Synthetic Peptide
TPLGDTTHTCPRCPEPKSCDTPPPCPRCPEPKSCDTPPPCPRCPEPKS

SEQ ID NO: 2922 - protein, 48 aa, synthetic construct
  REGION 1..48: note = Synthetic Peptide
PLGDTTHTCPRCPEPKSCDTPPPCPRCPEPKSCDTPPPCPRCPEPKSC

SEQ ID NO: 2923 - protein, 48 aa, synthetic construct
  REGION 1..48: note = Synthetic Peptide
LGDTTHTCPRCPEPKSCDTPPPCPRCPEPKSCDTPPPCPRCPEPKSCD

SEQ ID NO: 2924 - protein, 48 aa, synthetic construct
  REGION 1..48: note = Synthetic Peptide
GDTTHTCPRCPEPKSCDTPPPCPRCPEPKSCDTPPPCPRCPEPKSCDT

SEQ ID NO: 2925 - protein, 48 aa, synthetic construct
  REGION 1..48: note = Synthetic Peptide
DTTHTCPRCPEPKSCDTPPPCPRCPEPKSCDTPPPCPRCPEPKSCDTP

SEQ ID NO: 2926 - protein, 48 aa, synthetic construct
  REGION 1..48: note = Synthetic Peptide
TTHTCPRCPEPKSCDTPPPCPRCPEPKSCDTPPPCPRCPEPKSCDTPP

SEQ ID NO: 2927 - protein, 48 aa, synthetic construct
  REGION 1..48: note = Synthetic Peptide
THTCPRCPEPKSCDTPPPCPRCPEPKSCDTPPPCPRCPEPKSCDTPPP

SEQ ID NO: 2928 - protein, 48 aa, synthetic construct
  REGION 1..48: note = Synthetic Peptide
HTCPRCPEPKSCDTPPPCPRCPEPKSCDTPPPCPRCPEPKSCDTPPPC

SEQ ID NO: 2929 - protein, 48 aa, synthetic construct
  REGION 1..48: note = Synthetic Peptide
TCPRCPEPKSCDTPPPCPRCPEPKSCDTPPPCPRCPEPKSCDTPPPCP

SEQ ID NO: 2930 - protein, 48 aa, synthetic construct
  REGION 1..48: note = Synthetic Peptide
CPRCPEPKSCDTPPPCPRCPEPKSCDTPPPCPRCPEPKSCDTPPPCPR

SEQ ID NO: 2931 - protein, 48 aa, synthetic construct
  REGION 1..48: note = Synthetic Peptide
PRCPEPKSCDTPPPCPRCPEPKSCDTPPPCPRCPEPKSCDTPPPCPRC

SEQ ID NO: 2932 - protein, 48 aa, synthetic construct
  REGION 1..48: note = Synthetic Peptide
RCPEPKSCDTPPPCPRCPEPKSCDTPPPCPRCPEPKSCDTPPPCPRCP

SEQ ID NO: 2933 - protein, 47 aa, synthetic construct
  REGION 1..47: note = Synthetic Peptide
ELKTPLGDTTHTCPRCPEPKSCDTPPPCPRCPEPKSCDTPPPCPRCP

SEQ ID NO: 2934 - protein, 47 aa, synthetic construct
  REGION 1..47: note = Synthetic Peptide
LKTPLGDTTHTCPRCPEPKSCDTPPPCPRCPEPKSCDTPPPCPRCPE

SEQ ID NO: 2935 - protein, 47 aa, synthetic construct
  REGION 1..47: note = Synthetic Peptide
KTPLGDTTHTCPRCPEPKSCDTPPPCPRCPEPKSCDTPPPCPRCPEP

SEQ ID NO: 2936 - protein, 47 aa, synthetic construct
  REGION 1..47: note = Synthetic Peptide
TPLGDTTHTCPRCPEPKSCDTPPPCPRCPEPKSCDTPPPCPRCPEPK

SEQ ID NO: 2937 - protein, 47 aa, synthetic construct
  REGION 1..47: note = Synthetic Peptide
PLGDTTHTCPRCPEPKSCDTPPPCPRCPEPKSCDTPPPCPRCPEPKS

SEQ ID NO: 2938 - protein, 47 aa, synthetic construct
  REGION 1..47: note = Synthetic Peptide
LGDTTHTCPRCPEPKSCDTPPPCPRCPEPKSCDTPPPCPRCPEPKSC

SEQ ID NO: 2939 - protein, 47 aa, synthetic construct
  REGION 1..47: note = Synthetic Peptide
GDTTHTCPRCPEPKSCDTPPPCPRCPEPKSCDTPPPCPRCPEPKSCD

SEQ ID NO: 2940 - protein, 47 aa, synthetic construct
  REGION 1..47: note = Synthetic Peptide
DTTHTCPRCPEPKSCDTPPPCPRCPEPKSCDTPPPCPRCPEPKSCDT

SEQ ID NO: 2941 - protein, 47 aa, synthetic construct
  REGION 1..47: note = Synthetic Peptide
TTHTCPRCPEPKSCDTPPPCPRCPEPKSCDTPPPCPRCPEPKSCDTP

SEQ ID NO: 2942 - protein, 47 aa, synthetic construct
  REGION 1..47: note = Synthetic Peptide
THTCPRCPEPKSCDTPPPCPRCPEPKSCDTPPPCPRCPEPKSCDTPP

SEQ ID NO: 2943 - protein, 47 aa, synthetic construct
  REGION 1..47: note = Synthetic Peptide
HTCPRCPEPKSCDTPPPCPRCPEPKSCDTPPPCPRCPEPKSCDTPPP

SEQ ID NO: 2944 - protein, 47 aa, synthetic construct
  REGION 1..47: note = Synthetic Peptide
TCPRCPEPKSCDTPPPCPRCPEPKSCDTPPPCPRCPEPKSCDTPPPC

SEQ ID NO: 2945 - protein, 47 aa, synthetic construct
  REGION 1..47: note = Synthetic Peptide
CPRCPEPKSCDTPPPCPRCPEPKSCDTPPPCPRCPEPKSCDTPPPCP

SEQ ID NO: 2946 - protein, 47 aa, synthetic construct
  REGION 1..47: note = Synthetic Peptide
PRCPEPKSCDTPPPCPRCPEPKSCDTPPPCPRCPEPKSCDTPPPCPR

SEQ ID NO: 2947 - protein, 47 aa, synthetic construct
  REGION 1..47: note = Synthetic Peptide
RCPEPKSCDTPPPCPRCPEPKSCDTPPPCPRCPEPKSCDTPPPCPRC

SEQ ID NO: 2948 - protein, 47 aa, synthetic construct
  REGION 1..47: note = Synthetic Peptide
CPEPKSCDTPPPCPRCPEPKSCDTPPPCPRCPEPKSCDTPPPCPRCP

SEQ ID NO: 2949 - protein, 46 aa, synthetic construct
  REGION 1..46: note = Synthetic Peptide
ELKTPLGDTTHTCPRCPEPKSCDTPPPCPRCPEPKSCDTPPPCPRC

SEQ ID NO: 2950 - protein, 46 aa, synthetic construct
  REGION 1..46: note = Synthetic Peptide
LKTPLGDTTHTCPRCPEPKSCDTPPPCPRCPEPKSCDTPPPCPRCP

SEQ ID NO: 2951 - protein, 46 aa, synthetic construct
  REGION 1..46: note = Synthetic Peptide
KTPLGDTTHTCPRCPEPKSCDTPPPCPRCPEPKSCDTPPPCPRCPE

SEQ ID NO: 2952 - protein, 46 aa, synthetic construct
  REGION 1..46: note = Synthetic Peptide
TPLGDTTHTCPRCPEPKSCDTPPPCPRCPEPKSCDTPPPCPRCPEP

SEQ ID NO: 2953 - protein, 46 aa, synthetic construct
  REGION 1..46: note = Synthetic Peptide
PLGDTTHTCPRCPEPKSCDTPPPCPRCPEPKSCDTPPPCPRCPEPK

SEQ ID NO: 2954 - protein, 46 aa, synthetic construct
  REGION 1..46: note = Synthetic Peptide
LGDTTHTCPRCPEPKSCDTPPPCPRCPEPKSCDTPPPCPRCPEPKS

SEQ ID NO: 2955 - protein, 46 aa, synthetic construct
  REGION 1..46: note = Synthetic Peptide
GDTTHTCPRCPEPKSCDTPPPCPRCPEPKSCDTPPPCPRCPEPKSC

SEQ ID NO: 2956 - protein, 46 aa, synthetic construct
  REGION 1..46: note = Synthetic Peptide
DTTHTCPRCPEPKSCDTPPPCPRCPEPKSCDTPPPCPRCPEPKSCD

SEQ ID NO: 2957 - protein, 46 aa, synthetic construct
  REGION 1..46: note = Synthetic Peptide
TTHTCPRCPEPKSCDTPPPCPRCPEPKSCDTPPPCPRCPEPKSCDT

SEQ ID NO: 2958 - protein, 46 aa, synthetic construct
  REGION 1..46: note = Synthetic Peptide
THTCPRCPEPKSCDTPPPCPRCPEPKSCDTPPPCPRCPEPKSCDTP

SEQ ID NO: 2959 - protein, 46 aa, synthetic construct
  REGION 1..46: note = Synthetic Peptide
HTCPRCPEPKSCDTPPPCPRCPEPKSCDTPPPCPRCPEPKSCDTPP

SEQ ID NO: 2960 - protein, 46 aa, synthetic construct
  REGION 1..46: note = Synthetic Peptide
TCPRCPEPKSCDTPPPCPRCPEPKSCDTPPPCPRCPEPKSCDTPPP

SEQ ID NO: 2961 - protein, 46 aa, synthetic construct
  REGION 1..46: note = Synthetic Peptide
CPRCPEPKSCDTPPPCPRCPEPKSCDTPPPCPRCPEPKSCDTPPPC

SEQ ID NO: 2962 - protein, 46 aa, synthetic construct
  REGION 1..46: note = Synthetic Peptide
PRCPEPKSCDTPPPCPRCPEPKSCDTPPPCPRCPEPKSCDTPPPCP

SEQ ID NO: 2963 - protein, 46 aa, synthetic construct
  REGION 1..46: note = Synthetic Peptide
RCPEPKSCDTPPPCPRCPEPKSCDTPPPCPRCPEPKSCDTPPPCPR

SEQ ID NO: 2964 - protein, 46 aa, synthetic construct
  REGION 1..46: note = Synthetic Peptide
CPEPKSCDTPPPCPRCPEPKSCDTPPPCPRCPEPKSCDTPPPCPRC

SEQ ID NO: 2965 - protein, 46 aa, synthetic construct
  REGION 1..46: note = Synthetic Peptide
PEPKSCDTPPPCPRCPEPKSCDTPPPCPRCPEPKSCDTPPPCPRCP

SEQ ID NO: 2966 - protein, 45 aa, synthetic construct
  REGION 1..45: note = Synthetic Peptide
ELKTPLGDTTHTCPRCPEPKSCDTPPPCPRCPEPKSCDTPPPCPR

SEQ ID NO: 2967 - protein, 45 aa, synthetic construct
  REGION 1..45: note = Synthetic Peptide
LKTPLGDTTHTCPRCPEPKSCDTPPPCPRCPEPKSCDTPPPCPRC

SEQ ID NO: 2968 - protein, 45 aa, synthetic construct
  REGION 1..45: note = Synthetic Peptide
KTPLGDTTHTCPRCPEPKSCDTPPPCPRCPEPKSCDTPPPCPRCP

SEQ ID NO: 2969 - protein, 45 aa, synthetic construct
  REGION 1..45: note = Synthetic Peptide
TPLGDTTHTCPRCPEPKSCDTPPPCPRCPEPKSCDTPPPCPRCPE

SEQ ID NO: 2970 - protein, 45 aa, synthetic construct
  REGION 1..45: note = Synthetic Peptide
PLGDTTHTCPRCPEPKSCDTPPPCPRCPEPKSCDTPPPCPRCPEP

SEQ ID NO: 2971 - protein, 45 aa, synthetic construct
  REGION 1..45: note = Synthetic Peptide
LGDTTHTCPRCPEPKSCDTPPPCPRCPEPKSCDTPPPCPRCPEPK

SEQ ID NO: 2972 - protein, 45 aa, synthetic construct
  REGION 1..45: note = Synthetic Peptide
GDTTHTCPRCPEPKSCDTPPPCPRCPEPKSCDTPPPCPRCPEPKS

SEQ ID NO: 2973 - protein, 45 aa, synthetic construct
  REGION 1..45: note = Synthetic Peptide
DTTHTCPRCPEPKSCDTPPPCPRCPEPKSCDTPPPCPRCPEPKSC

SEQ ID NO: 2974 - protein, 45 aa, synthetic construct
  REGION 1..45: note = Synthetic Peptide
TTHTCPRCPEPKSCDTPPPCPRCPEPKSCDTPPPCPRCPEPKSCD

SEQ ID NO: 2975 - protein, 45 aa, synthetic construct
  REGION 1..45: note = Synthetic Peptide
THTCPRCPEPKSCDTPPPCPRCPEPKSCDTPPPCPRCPEPKSCDT

SEQ ID NO: 2976 - protein, 45 aa, synthetic construct
  REGION 1..45: note = Synthetic Peptide
HTCPRCPEPKSCDTPPPCPRCPEPKSCDTPPPCPRCPEPKSCDTP

SEQ ID NO: 2977 - protein, 45 aa, synthetic construct
  REGION 1..45: note = Synthetic Peptide
TCPRCPEPKSCDTPPPCPRCPEPKSCDTPPPCPRCPEPKSCDTPP

SEQ ID NO: 2978 - protein, 45 aa, synthetic construct
  REGION 1..45: note = Synthetic Peptide
CPRCPEPKSCDTPPPCPRCPEPKSCDTPPPCPRCPEPKSCDTPPP

SEQ ID NO: 2979 - protein, 45 aa, synthetic construct
  REGION 1..45: note = Synthetic Peptide
PRCPEPKSCDTPPPCPRCPEPKSCDTPPPCPRCPEPKSCDTPPPC

SEQ ID NO: 2980 - protein, 45 aa, synthetic construct
  REGION 1..45: note = Synthetic Peptide
RCPEPKSCDTPPPCPRCPEPKSCDTPPPCPRCPEPKSCDTPPPCP

SEQ ID NO: 2981 - protein, 45 aa, synthetic construct
  REGION 1..45: note = Synthetic Peptide
CPEPKSCDTPPPCPRCPEPKSCDTPPPCPRCPEPKSCDTPPPCPR

SEQ ID NO: 2982 - protein, 45 aa, synthetic construct
  REGION 1..45: note = Synthetic Peptide
PEPKSCDTPPPCPRCPEPKSCDTPPPCPRCPEPKSCDTPPPCPRC

SEQ ID NO: 2983 - protein, 45 aa, synthetic construct
  REGION 1..45: note = Synthetic Peptide
EPKSCDTPPPCPRCPEPKSCDTPPPCPRCPEPKSCDTPPPCPRCP

SEQ ID NO: 2984 - protein, 44 aa, synthetic construct
  REGION 1..44: note = Synthetic Peptide
ELKTPLGDTTHTCPRCPEPKSCDTPPPCPRCPEPKSCDTPPPCP

SEQ ID NO: 2985 - protein, 44 aa, synthetic construct
  REGION 1..44: note = Synthetic Peptide
LKTPLGDTTHTCPRCPEPKSCDTPPPCPRCPEPKSCDTPPPCPR

SEQ ID NO: 2986 - protein, 44 aa, synthetic construct
  REGION 1..44: note = Synthetic Peptide
KTPLGDTTHTCPRCPEPKSCDTPPPCPRCPEPKSCDTPPPCPRC

SEQ ID NO: 2987 - protein, 44 aa, synthetic construct
  REGION 1..44: note = Synthetic Peptide
TPLGDTTHTCPRCPEPKSCDTPPPCPRCPEPKSCDTPPPCPRCP

SEQ ID NO: 2988 - protein, 44 aa, synthetic construct
  REGION 1..44: note = Synthetic Peptide
PLGDTTHTCPRCPEPKSCDTPPPCPRCPEPKSCDTPPPCPRCPE

SEQ ID NO: 2989 - protein, 44 aa, synthetic construct
  REGION 1..44: note = Synthetic Peptide
LGDTTHTCPRCPEPKSCDTPPPCPRCPEPKSCDTPPPCPRCPEP

SEQ ID NO: 2990 - protein, 44 aa, synthetic construct
  REGION 1..44: note = Synthetic Peptide
GDTTHTCPRCPEPKSCDTPPPCPRCPEPKSCDTPPPCPRCPEPK

SEQ ID NO: 2991 - protein, 44 aa, synthetic construct
  REGION 1..44: note = Synthetic Peptide
DTTHTCPRCPEPKSCDTPPPCPRCPEPKSCDTPPPCPRCPEPKS

SEQ ID NO: 2992 - protein, 44 aa, synthetic construct
  REGION 1..44: note = Synthetic Peptide
TTHTCPRCPEPKSCDTPPPCPRCPEPKSCDTPPPCPRCPEPKSC

SEQ ID NO: 2993 - protein, 44 aa, synthetic construct
  REGION 1..44: note = Synthetic Peptide
THTCPRCPEPKSCDTPPPCPRCPEPKSCDTPPPCPRCPEPKSCD

SEQ ID NO: 2994 - protein, 44 aa, synthetic construct
  REGION 1..44: note = Synthetic Peptide
HTCPRCPEPKSCDTPPPCPRCPEPKSCDTPPPCPRCPEPKSCDT

SEQ ID NO: 2995 - protein, 44 aa, synthetic construct
  REGION 1..44: note = Synthetic Peptide
TCPRCPEPKSCDTPPPCPRCPEPKSCDTPPPCPRCPEPKSCDTP

SEQ ID NO: 2996 - protein, 44 aa, synthetic construct
  REGION 1..44: note = Synthetic Peptide
CPRCPEPKSCDTPPPCPRCPEPKSCDTPPPCPRCPEPKSCDTPP

SEQ ID NO: 2997 - protein, 44 aa, synthetic construct
  REGION 1..44: note = Synthetic Peptide
PRCPEPKSCDTPPPCPRCPEPKSCDTPPPCPRCPEPKSCDTPPP

SEQ ID NO: 2998 - protein, 44 aa, synthetic construct
  REGION 1..44: note = Synthetic Peptide
RCPEPKSCDTPPPCPRCPEPKSCDTPPPCPRCPEPKSCDTPPPC

SEQ ID NO: 2999 - protein, 44 aa, synthetic construct
  REGION 1..44: note = Synthetic Peptide
CPEPKSCDTPPPCPRCPEPKSCDTPPPCPRCPEPKSCDTPPPCP

SEQ ID NO: 3000 - protein, 44 aa, synthetic construct
  REGION 1..44: note = Synthetic Peptide
PEPKSCDTPPPCPRCPEPKSCDTPPPCPRCPEPKSCDTPPPCPR

SEQ ID NO: 3001 - protein, 44 aa, synthetic construct
  REGION 1..44: note = Synthetic Peptide
EPKSCDTPPPCPRCPEPKSCDTPPPCPRCPEPKSCDTPPPCPRC

SEQ ID NO: 3002 - protein, 44 aa, synthetic construct
  REGION 1..44: note = Synthetic Peptide
PKSCDTPPPCPRCPEPKSCDTPPPCPRCPEPKSCDTPPPCPRCP

SEQ ID NO: 3003 - protein, 43 aa, synthetic construct
  REGION 1..43: note = Synthetic Peptide
ELKTPLGDTTHTCPRCPEPKSCDTPPPCPRCPEPKSCDTPPPC

SEQ ID NO: 3004 - protein, 43 aa, synthetic construct
  REGION 1..43: note = Synthetic Peptide
LKTPLGDTTHTCPRCPEPKSCDTPPPCPRCPEPKSCDTPPPCP

SEQ ID NO: 3005 - protein, 43 aa, synthetic construct
  REGION 1..43: note = Synthetic Peptide
KTPLGDTTHTCPRCPEPKSCDTPPPCPRCPEPKSCDTPPPCPR

SEQ ID NO: 3006 - protein, 43 aa, synthetic construct
  REGION 1..43: note = Synthetic Peptide
TPLGDTTHTCPRCPEPKSCDTPPPCPRCPEPKSCDTPPPCPRC

SEQ ID NO: 3007 - protein, 43 aa, synthetic construct
  REGION 1..43: note = Synthetic Peptide
PLGDTTHTCPRCPEPKSCDTPPPCPRCPEPKSCDTPPPCPRCP

SEQ ID NO: 3008 - protein, 43 aa, synthetic construct
  REGION 1..43: note = Synthetic Peptide
LGDTTHTCPRCPEPKSCDTPPPCPRCPEPKSCDTPPPCPRCPE

SEQ ID NO: 3009 - protein, 43 aa, synthetic construct
  REGION 1..43: note = Synthetic Peptide
GDTTHTCPRCPEPKSCDTPPPCPRCPEPKSCDTPPPCPRCPEP

SEQ ID NO: 3010 - protein, 43 aa, synthetic construct
  REGION 1..43: note = Synthetic Peptide
DTTHTCPRCPEPKSCDTPPPCPRCPEPKSCDTPPPCPRCPEPK

SEQ ID NO: 3011 - protein, 43 aa, synthetic construct
  REGION 1..43: note = Synthetic Peptide
TTHTCPRCPEPKSCDTPPPCPRCPEPKSCDTPPPCPRCPEPKS

SEQ ID NO: 3012 - protein, 43 aa, synthetic construct
  REGION 1..43: note = Synthetic Peptide
THTCPRCPEPKSCDTPPPCPRCPEPKSCDTPPPCPRCPEPKSC

SEQ ID NO: 3013 - protein, 43 aa, synthetic construct
  REGION 1..43: note = Synthetic Peptide
HTCPRCPEPKSCDTPPPCPRCPEPKSCDTPPPCPRCPEPKSCD

SEQ ID NO: 3014 - protein, 43 aa, synthetic construct
  REGION 1..43: note = Synthetic Peptide
TCPRCPEPKSCDTPPPCPRCPEPKSCDTPPPCPRCPEPKSCDT

SEQ ID NO: 3015 - protein, 43 aa, synthetic construct
  REGION 1..43: note = Synthetic Peptide
CPRCPEPKSCDTPPPCPRCPEPKSCDTPPPCPRCPEPKSCDTP

SEQ ID NO: 3016 - protein, 43 aa, synthetic construct
  REGION 1..43: note = Synthetic Peptide
PRCPEPKSCDTPPPCPRCPEPKSCDTPPPCPRCPEPKSCDTPP

SEQ ID NO: 3017 - protein, 43 aa, synthetic construct
  REGION 1..43: note = Synthetic Peptide
RCPEPKSCDTPPPCPRCPEPKSCDTPPPCPRCPEPKSCDTPPP

SEQ ID NO: 3018 - protein, 43 aa, synthetic construct
  REGION 1..43: note = Synthetic Peptide
CPEPKSCDTPPPCPRCPEPKSCDTPPPCPRCPEPKSCDTPPPC

SEQ ID NO: 3019 - protein, 43 aa, synthetic construct
  REGION 1..43: note = Synthetic Peptide
PEPKSCDTPPPCPRCPEPKSCDTPPPCPRCPEPKSCDTPPPCP

SEQ ID NO: 3020 - protein, 43 aa, synthetic construct
  REGION 1..43: note = Synthetic Peptide
EPKSCDTPPPCPRCPEPKSCDTPPPCPRCPEPKSCDTPPPCPR

SEQ ID NO: 3021 - protein, 43 aa, synthetic construct
  REGION 1..43: note = Synthetic Peptide
PKSCDTPPPCPRCPEPKSCDTPPPCPRCPEPKSCDTPPPCPRC

SEQ ID NO: 3022 - protein, 43 aa, synthetic construct
  REGION 1..43: note = Synthetic Peptide
KSCDTPPPCPRCPEPKSCDTPPPCPRCPEPKSCDTPPPCPRCP

SEQ ID NO: 3023 - protein, 42 aa, synthetic construct
  REGION 1..42: note = Synthetic Peptide
ELKTPLGDTTHTCPRCPEPKSCDTPPPCPRCPEPKSCDTPPP

SEQ ID NO: 3024 - protein, 42 aa, synthetic construct
  REGION 1..42: note = Synthetic Peptide
LKTPLGDTTHTCPRCPEPKSCDTPPPCPRCPEPKSCDTPPPC

SEQ ID NO: 3025 - protein, 42 aa, synthetic construct
  REGION 1..42: note = Synthetic Peptide
KTPLGDTTHTCPRCPEPKSCDTPPPCPRCPEPKSCDTPPPCP

SEQ ID NO: 3026 - protein, 42 aa, synthetic construct
  REGION 1..42: note = Synthetic Peptide
TPLGDTTHTCPRCPEPKSCDTPPPCPRCPEPKSCDTPPPCPR

SEQ ID NO: 3027 - protein, 42 aa, synthetic construct
  REGION 1..42: note = Synthetic Peptide
PLGDTTHTCPRCPEPKSCDTPPPCPRCPEPKSCDTPPPCPRC

SEQ ID NO: 3028 - protein, 42 aa, synthetic construct
  REGION 1..42: note = Synthetic Peptide
LGDTTHTCPRCPEPKSCDTPPPCPRCPEPKSCDTPPPCPRCP

SEQ ID NO: 3029 - protein, 42 aa, synthetic construct
  REGION 1..42: note = Synthetic Peptide
GDTTHTCPRCPEPKSCDTPPPCPRCPEPKSCDTPPPCPRCPE

SEQ ID NO: 3030 - protein, 42 aa, synthetic construct
  REGION 1..42: note = Synthetic Peptide
DTTHTCPRCPEPKSCDTPPPCPRCPEPKSCDTPPPCPRCPEP

SEQ ID NO: 3031 - protein, 42 aa, synthetic construct
  REGION 1..42: note = Synthetic Peptide
TTHTCPRCPEPKSCDTPPPCPRCPEPKSCDTPPPCPRCPEPK

SEQ ID NO: 3032 - protein, 42 aa, synthetic construct
  REGION 1..42: note = Synthetic Peptide
THTCPRCPEPKSCDTPPPCPRCPEPKSCDTPPPCPRCPEPKS

SEQ ID NO: 3033 - protein, 42 aa, synthetic construct
  REGION 1..42: note = Synthetic Peptide
HTCPRCPEPKSCDTPPPCPRCPEPKSCDTPPPCPRCPEPKSC

SEQ ID NO: 3034 - protein, 42 aa, synthetic construct
  REGION 1..42: note = Synthetic Peptide
TCPRCPEPKSCDTPPPCPRCPEPKSCDTPPPCPRCPEPKSCD

SEQ ID NO: 3035 - protein, 42 aa, synthetic construct
  REGION 1..42: note = Synthetic Peptide
CPRCPEPKSCDTPPPCPRCPEPKSCDTPPPCPRCPEPKSCDT

SEQ ID NO: 3036 - protein, 42 aa, synthetic construct
  REGION 1..42: note = Synthetic Peptide
PRCPEPKSCDTPPPCPRCPEPKSCDTPPPCPRCPEPKSCDTP

SEQ ID NO: 3037 - protein, 42 aa, synthetic construct
  REGION 1..42: note = Synthetic Peptide
RCPEPKSCDTPPPCPRCPEPKSCDTPPPCPRCPEPKSCDTPP

SEQ ID NO: 3038 - protein, 42 aa, synthetic construct
  REGION 1..42: note = Synthetic Peptide
CPEPKSCDTPPPCPRCPEPKSCDTPPPCPRCPEPKSCDTPPP

SEQ ID NO: 3039 - protein, 42 aa, synthetic construct
  REGION 1..42: note = Synthetic Peptide
PEPKSCDTPPPCPRCPEPKSCDTPPPCPRCPEPKSCDTPPPC

SEQ ID NO: 3040 - protein, 42 aa, synthetic construct
  REGION 1..42: note = Synthetic Peptide
EPKSCDTPPPCPRCPEPKSCDTPPPCPRCPEPKSCDTPPPCP

SEQ ID NO: 3041 - protein, 42 aa, synthetic construct
  REGION 1..42: note = Synthetic Peptide
PKSCDTPPPCPRCPEPKSCDTPPPCPRCPEPKSCDTPPPCPR

SEQ ID NO: 3042 - protein, 42 aa, synthetic construct
  REGION 1..42: note = Synthetic Peptide
KSCDTPPPCPRCPEPKSCDTPPPCPRCPEPKSCDTPPPCPRC

SEQ ID NO: 3043 - protein, 42 aa, synthetic construct
  REGION 1..42: note = Synthetic Peptide
SCDTPPPCPRCPEPKSCDTPPPCPRCPEPKSCDTPPPCPRCP

SEQ ID NO: 3044 - protein, 41 aa, synthetic construct
  REGION 1..41: note = Synthetic Peptide
ELKTPLGDTTHTCPRCPEPKSCDTPPPCPRCPEPKSCDTPP

SEQ ID NO: 3045 - protein, 41 aa, synthetic construct
  REGION 1..41: note = Synthetic Peptide
LKTPLGDTTHTCPRCPEPKSCDTPPPCPRCPEPKSCDTPPP

SEQ ID NO: 3046 - protein, 41 aa, synthetic construct
  REGION 1..41: note = Synthetic Peptide
KTPLGDTTHTCPRCPEPKSCDTPPPCPRCPEPKSCDTPPPC

SEQ ID NO: 3047 - protein, 41 aa, synthetic construct
  REGION 1..41: note = Synthetic Peptide
TPLGDTTHTCPRCPEPKSCDTPPPCPRCPEPKSCDTPPPCP

SEQ ID NO: 3048 - protein, 41 aa, synthetic construct
  REGION 1..41: note = Synthetic Peptide
PLGDTTHTCPRCPEPKSCDTPPPCPRCPEPKSCDTPPPCPR

SEQ ID NO: 3049 - protein, 41 aa, synthetic construct
  REGION 1..41: note = Synthetic Peptide
LGDTTHTCPRCPEPKSCDTPPPCPRCPEPKSCDTPPPCPRC

SEQ ID NO: 3050 - protein, 41 aa, synthetic construct
  REGION 1..41: note = Synthetic Peptide
GDTTHTCPRCPEPKSCDTPPPCPRCPEPKSCDTPPPCPRCP

SEQ ID NO: 3051 - protein, 41 aa, synthetic construct
  REGION 1..41: note = Synthetic Peptide
DTTHTCPRCPEPKSCDTPPPCPRCPEPKSCDTPPPCPRCPE

SEQ ID NO: 3052 - protein, 41 aa, synthetic construct
  REGION 1..41: note = Synthetic Peptide
TTHTCPRCPEPKSCDTPPPCPRCPEPKSCDTPPPCPRCPEP

SEQ ID NO: 3053 - protein, 41 aa, synthetic construct
  REGION 1..41: note = Synthetic Peptide
THTCPRCPEPKSCDTPPPCPRCPEPKSCDTPPPCPRCPEPK

SEQ ID NO: 3054 - protein, 41 aa, synthetic construct
  REGION 1..41: note = Synthetic Peptide
HTCPRCPEPKSCDTPPPCPRCPEPKSCDTPPPCPRCPEPKS

SEQ ID NO: 3055 - protein, 41 aa, synthetic construct
  REGION 1..41: note = Synthetic Peptide
TCPRCPEPKSCDTPPPCPRCPEPKSCDTPPPCPRCPEPKSC

SEQ ID NO: 3056 - protein, 41 aa, synthetic construct
  REGION 1..41: note = Synthetic Peptide
CPRCPEPKSCDTPPPCPRCPEPKSCDTPPPCPRCPEPKSCD

SEQ ID NO: 3057 - protein, 41 aa, synthetic construct
  REGION 1..41: note = Synthetic Peptide
PRCPEPKSCDTPPPCPRCPEPKSCDTPPPCPRCPEPKSCDT

SEQ ID NO: 3058 - protein, 41 aa, synthetic construct
  REGION 1..41: note = Synthetic Peptide
RCPEPKSCDTPPPCPRCPEPKSCDTPPPCPRCPEPKSCDTP

SEQ ID NO: 3059 - protein, 41 aa, synthetic construct
  REGION 1..41: note = Synthetic Peptide
CPEPKSCDTPPPCPRCPEPKSCDTPPPCPRCPEPKSCDTPP

SEQ ID NO: 3060 - protein, 41 aa, synthetic construct
  REGION 1..41: note = Synthetic Peptide
PEPKSCDTPPPCPRCPEPKSCDTPPPCPRCPEPKSCDTPPP

SEQ ID NO: 3061 - protein, 41 aa, synthetic construct
  REGION 1..41: note = Synthetic Peptide
EPKSCDTPPPCPRCPEPKSCDTPPPCPRCPEPKSCDTPPPC

SEQ ID NO: 3062 - protein, 41 aa, synthetic construct
  REGION 1..41: note = Synthetic Peptide
PKSCDTPPPCPRCPEPKSCDTPPPCPRCPEPKSCDTPPPCP

SEQ ID NO: 3063 - protein, 41 aa, synthetic construct
  REGION 1..41: note = Synthetic Peptide
KSCDTPPPCPRCPEPKSCDTPPPCPRCPEPKSCDTPPPCPR

SEQ ID NO: 3064 - protein, 41 aa, synthetic construct
  REGION 1..41: note = Synthetic Peptide
SCDTPPPCPRCPEPKSCDTPPPCPRCPEPKSCDTPPPCPRC

SEQ ID NO: 3065 - protein, 41 aa, synthetic construct
  REGION 1..41: note = Synthetic Peptide
CDTPPPCPRCPEPKSCDTPPPCPRCPEPKSCDTPPPCPRCP

SEQ ID NO: 3066 - protein, 40 aa, synthetic construct
  REGION 1..40: note = Synthetic Peptide
ELKTPLGDTTHTCPRCPEPKSCDTPPPCPRCPEPKSCDTP

SEQ ID NO: 3067 - protein, 40 aa, synthetic construct
  REGION 1..40: note = Synthetic Peptide
LKTPLGDTTHTCPRCPEPKSCDTPPPCPRCPEPKSCDTPP

SEQ ID NO: 3068 - protein, 40 aa, synthetic construct
  REGION 1..40: note = Synthetic Peptide
KTPLGDTTHTCPRCPEPKSCDTPPPCPRCPEPKSCDTPPP

SEQ ID NO: 3069 - protein, 40 aa, synthetic construct
  REGION 1..40: note = Synthetic Peptide
TPLGDTTHTCPRCPEPKSCDTPPPCPRCPEPKSCDTPPPC

SEQ ID NO: 3070 - protein, 40 aa, synthetic construct
  REGION 1..40: note = Synthetic Peptide
PLGDTTHTCPRCPEPKSCDTPPPCPRCPEPKSCDTPPPCP

SEQ ID NO: 3071 - protein, 40 aa, synthetic construct
  REGION 1..40: note = Synthetic Peptide
LGDTTHTCPRCPEPKSCDTPPPCPRCPEPKSCDTPPPCPR

SEQ ID NO: 3072 - protein, 40 aa, synthetic construct
  REGION 1..40: note = Synthetic Peptide
GDTTHTCPRCPEPKSCDTPPPCPRCPEPKSCDTPPPCPRC

SEQ ID NO: 3073 - protein, 40 aa, synthetic construct
  REGION 1..40: note = Synthetic Peptide
DTTHTCPRCPEPKSCDTPPPCPRCPEPKSCDTPPPCPRCP

SEQ ID NO: 3074 - protein, 40 aa, synthetic construct
  REGION 1..40: note = Synthetic Peptide
TTHTCPRCPEPKSCDTPPPCPRCPEPKSCDTPPPCPRCPE

SEQ ID NO: 3075 - protein, 40 aa, synthetic construct
  REGION 1..40: note = Synthetic Peptide
THTCPRCPEPKSCDTPPPCPRCPEPKSCDTPPPCPRCPEP

SEQ ID NO: 3076 - protein, 40 aa, synthetic construct
  REGION 1..40: note = Synthetic Peptide
HTCPRCPEPKSCDTPPPCPRCPEPKSCDTPPPCPRCPEPK

SEQ ID NO: 3077 - protein, 40 aa, synthetic construct
  REGION 1..40: note = Synthetic Peptide
TCPRCPEPKSCDTPPPCPRCPEPKSCDTPPPCPRCPEPKS

SEQ ID NO: 3078 - protein, 40 aa, synthetic construct
  REGION 1..40: note = Synthetic Peptide
CPRCPEPKSCDTPPPCPRCPEPKSCDTPPPCPRCPEPKSC

SEQ ID NO: 3079 - protein, 40 aa, synthetic construct
  REGION 1..40: note = Synthetic Peptide
PRCPEPKSCDTPPPCPRCPEPKSCDTPPPCPRCPEPKSCD

SEQ ID NO: 3080 - protein, 40 aa, synthetic construct
  REGION 1..40: note = Synthetic Peptide
RCPEPKSCDTPPPCPRCPEPKSCDTPPPCPRCPEPKSCDT

SEQ ID NO: 3081 - protein, 40 aa, synthetic construct
  REGION 1..40: note = Synthetic Peptide
CPEPKSCDTPPPCPRCPEPKSCDTPPPCPRCPEPKSCDTP

SEQ ID NO: 3082 - protein, 40 aa, synthetic construct
  REGION 1..40: note = Synthetic Peptide
PEPKSCDTPPPCPRCPEPKSCDTPPPCPRCPEPKSCDTPP

SEQ ID NO: 3083 - protein, 40 aa, synthetic construct
  REGION 1..40: note = Synthetic Peptide
EPKSCDTPPPCPRCPEPKSCDTPPPCPRCPEPKSCDTPPP

SEQ ID NO: 3084 - protein, 40 aa, synthetic construct
  REGION 1..40: note = Synthetic Peptide
PKSCDTPPPCPRCPEPKSCDTPPPCPRCPEPKSCDTPPPC

SEQ ID NO: 3085 - protein, 40 aa, synthetic construct
  REGION 1..40: note = Synthetic Peptide
KSCDTPPPCPRCPEPKSCDTPPPCPRCPEPKSCDTPPPCP

SEQ ID NO: 3086 - protein, 40 aa, synthetic construct
  REGION 1..40: note = Synthetic Peptide
SCDTPPPCPRCPEPKSCDTPPPCPRCPEPKSCDTPPPCPR

SEQ ID NO: 3087 - protein, 40 aa, synthetic construct
  REGION 1..40: note = Synthetic Peptide
CDTPPPCPRCPEPKSCDTPPPCPRCPEPKSCDTPPPCPRC

SEQ ID NO: 3088 - protein, 40 aa, synthetic construct
  REGION 1..40: note = Synthetic Peptide
DTPPPCPRCPEPKSCDTPPPCPRCPEPKSCDTPPPCPRCP

SEQ ID NO: 3089 - protein, 39 aa, synthetic construct
  REGION 1..39: note = Synthetic Peptide
ELKTPLGDTTHTCPRCPEPKSCDTPPPCPRCPEPKSCDT

SEQ ID NO: 3090 - protein, 39 aa, synthetic construct
  REGION 1..39: note = Synthetic Peptide
LKTPLGDTTHTCPRCPEPKSCDTPPPCPRCPEPKSCDTP

SEQ ID NO: 3091 - protein, 39 aa, synthetic construct
  REGION 1..39: note = Synthetic Peptide
KTPLGDTTHTCPRCPEPKSCDTPPPCPRCPEPKSCDTPP

SEQ ID NO: 3092 - protein, 39 aa, synthetic construct
  REGION 1..39: note = Synthetic Peptide
TPLGDTTHTCPRCPEPKSCDTPPPCPRCPEPKSCDTPPP

SEQ ID NO: 3093 - protein, 39 aa, synthetic construct
  REGION 1..39: note = Synthetic Peptide
PLGDTTHTCPRCPEPKSCDTPPPCPRCPEPKSCDTPPPC

SEQ ID NO: 3094 - protein, 39 aa, synthetic construct
  REGION 1..39: note = Synthetic Peptide
LGDTTHTCPRCPEPKSCDTPPPCPRCPEPKSCDTPPPCP

SEQ ID NO: 3095 - protein, 39 aa, synthetic construct
  REGION 1..39: note = Synthetic Peptide
GDTTHTCPRCPEPKSCDTPPPCPRCPEPKSCDTPPPCPR

SEQ ID NO: 3096 - protein, 39 aa, synthetic construct
  REGION 1..39: note = Synthetic Peptide
DTTHTCPRCPEPKSCDTPPPCPRCPEPKSCDTPPPCPRC

SEQ ID NO: 3097 - protein, 39 aa, synthetic construct
  REGION 1..39: note = Synthetic Peptide
TTHTCPRCPEPKSCDTPPPCPRCPEPKSCDTPPPCPRCP

SEQ ID NO: 3098 - protein, 39 aa, synthetic construct
  REGION 1..39: note = Synthetic Peptide
THTCPRCPEPKSCDTPPPCPRCPEPKSCDTPPPCPRCPE

SEQ ID NO: 3099 - protein, 39 aa, synthetic construct
  REGION 1..39: note = Synthetic Peptide
HTCPRCPEPKSCDTPPPCPRCPEPKSCDTPPPCPRCPEP

SEQ ID NO: 3100 - protein, 39 aa, synthetic construct
  REGION 1..39: note = Synthetic Peptide
TCPRCPEPKSCDTPPPCPRCPEPKSCDTPPPCPRCPEPK

SEQ ID NO: 3101 - protein, 39 aa, synthetic construct
  REGION 1..39: note = Synthetic Peptide
CPRCPEPKSCDTPPPCPRCPEPKSCDTPPPCPRCPEPKS

SEQ ID NO: 3102 - protein, 39 aa, synthetic construct
  REGION 1..39: note = Synthetic Peptide
PRCPEPKSCDTPPPCPRCPEPKSCDTPPPCPRCPEPKSC

SEQ ID NO: 3103 - protein, 39 aa, synthetic construct
  REGION 1..39: note = Synthetic Peptide
RCPEPKSCDTPPPCPRCPEPKSCDTPPPCPRCPEPKSCD

SEQ ID NO: 3104 - protein, 39 aa, synthetic construct
  REGION 1..39: note = Synthetic Peptide
CPEPKSCDTPPPCPRCPEPKSCDTPPPCPRCPEPKSCDT

SEQ ID NO: 3105 - protein, 39 aa, synthetic construct
  REGION 1..39: note = Synthetic Peptide
PEPKSCDTPPPCPRCPEPKSCDTPPPCPRCPEPKSCDTP

SEQ ID NO: 3106 - protein, 39 aa, synthetic construct
  REGION 1..39: note = Synthetic Peptide
EPKSCDTPPPCPRCPEPKSCDTPPPCPRCPEPKSCDTPP

SEQ ID NO: 3107 - protein, 39 aa, synthetic construct
  REGION 1..39: note = Synthetic Peptide
PKSCDTPPPCPRCPEPKSCDTPPPCPRCPEPKSCDTPPP

SEQ ID NO: 3108 - protein, 39 aa, synthetic construct
  REGION 1..39: note = Synthetic Peptide
KSCDTPPPCPRCPEPKSCDTPPPCPRCPEPKSCDTPPPC

SEQ ID NO: 3109 - protein, 39 aa, synthetic construct
  REGION 1..39: note = Synthetic Peptide
SCDTPPPCPRCPEPKSCDTPPPCPRCPEPKSCDTPPPCP

SEQ ID NO: 3110 - protein, 39 aa, synthetic construct
  REGION 1..39: note = Synthetic Peptide
CDTPPPCPRCPEPKSCDTPPPCPRCPEPKSCDTPPPCPR

SEQ ID NO: 3111 - protein, 39 aa, synthetic construct
  REGION 1..39: note = Synthetic Peptide
DTPPPCPRCPEPKSCDTPPPCPRCPEPKSCDTPPPCPRC

SEQ ID NO: 3112 - protein, 39 aa, synthetic construct
  REGION 1..39: note = Synthetic Peptide
TPPPCPRCPEPKSCDTPPPCPRCPEPKSCDTPPPCPRCP

SEQ ID NO: 3113 - protein, 38 aa, synthetic construct
  REGION 1..38: note = Synthetic Peptide
ELKTPLGDTTHTCPRCPEPKSCDTPPPCPRCPEPKSCD

SEQ ID NO: 3114 - protein, 38 aa, synthetic construct
  REGION 1..38: note = Synthetic Peptide
LKTPLGDTTHTCPRCPEPKSCDTPPPCPRCPEPKSCDT

SEQ ID NO: 3115 - protein, 38 aa, synthetic construct
  REGION 1..38: note = Synthetic Peptide
KTPLGDTTHTCPRCPEPKSCDTPPPCPRCPEPKSCDTP

SEQ ID NO: 3116 - protein, 38 aa, synthetic construct
  REGION 1..38: note = Synthetic Peptide
TPLGDTTHTCPRCPEPKSCDTPPPCPRCPEPKSCDTPP

SEQ ID NO: 3117 - protein, 38 aa, synthetic construct
  REGION 1..38: note = Synthetic Peptide
PLGDTTHTCPRCPEPKSCDTPPPCPRCPEPKSCDTPPP

SEQ ID NO: 3118 - protein, 38 aa, synthetic construct
  REGION 1..38: note = Synthetic Peptide
LGDTTHTCPRCPEPKSCDTPPPCPRCPEPKSCDTPPPC

SEQ ID NO: 3119 - protein, 38 aa, synthetic construct
  REGION 1..38: note = Synthetic Peptide
GDTTHTCPRCPEPKSCDTPPPCPRCPEPKSCDTPPPCP

SEQ ID NO: 3120 - protein, 38 aa, synthetic construct
  REGION 1..38: note = Synthetic Peptide
DTTHTCPRCPEPKSCDTPPPCPRCPEPKSCDTPPPCPR

SEQ ID NO: 3121 - protein, 38 aa, synthetic construct
  REGION 1..38: note = Synthetic Peptide
TTHTCPRCPEPKSCDTPPPCPRCPEPKSCDTPPPCPRC

SEQ ID NO: 3122 - protein, 38 aa, synthetic construct
  REGION 1..38: note = Synthetic Peptide
THTCPRCPEPKSCDTPPPCPRCPEPKSCDTPPPCPRCP

SEQ ID NO: 3123 - protein, 38 aa, synthetic construct
  REGION 1..38: note = Synthetic Peptide
HTCPRCPEPKSCDTPPPCPRCPEPKSCDTPPPCPRCPE

SEQ ID NO: 3124 - protein, 38 aa, synthetic construct
  REGION 1..38: note = Synthetic Peptide
TCPRCPEPKSCDTPPPCPRCPEPKSCDTPPPCPRCPEP

SEQ ID NO: 3125 - protein, 38 aa, synthetic construct
  REGION 1..38: note = Synthetic Peptide
CPRCPEPKSCDTPPPCPRCPEPKSCDTPPPCPRCPEPK

SEQ ID NO: 3126 - protein, 38 aa, synthetic construct
  REGION 1..38: note = Synthetic Peptide
PRCPEPKSCDTPPPCPRCPEPKSCDTPPPCPRCPEPKS

SEQ ID NO: 3127 - protein, 38 aa, synthetic construct
  REGION 1..38: note = Synthetic Peptide
RCPEPKSCDTPPPCPRCPEPKSCDTPPPCPRCPEPKSC

SEQ ID NO: 3128 - protein, 38 aa, synthetic construct
  REGION 1..38: note = Synthetic Peptide
CPEPKSCDTPPPCPRCPEPKSCDTPPPCPRCPEPKSCD

SEQ ID NO: 3129 - protein, 38 aa, synthetic construct
  REGION 1..38: note = Synthetic Peptide
PEPKSCDTPPPCPRCPEPKSCDTPPPCPRCPEPKSCDT

SEQ ID NO: 3130 - protein, 38 aa, synthetic construct
  REGION 1..38: note = Synthetic Peptide
EPKSCDTPPPCPRCPEPKSCDTPPPCPRCPEPKSCDTP

SEQ ID NO: 3131 - protein, 38 aa, synthetic construct
  REGION 1..38: note = Synthetic Peptide
PKSCDTPPPCPRCPEPKSCDTPPPCPRCPEPKSCDTPP

SEQ ID NO: 3132 - protein, 38 aa, synthetic construct
  REGION 1..38: note = Synthetic Peptide
KSCDTPPPCPRCPEPKSCDTPPPCPRCPEPKSCDTPPP

SEQ ID NO: 3133 - protein, 38 aa, synthetic construct
  REGION 1..38: note = Synthetic Peptide
SCDTPPPCPRCPEPKSCDTPPPCPRCPEPKSCDTPPPC

SEQ ID NO: 3134 - protein, 38 aa, synthetic construct
  REGION 1..38: note = Synthetic Peptide
CDTPPPCPRCPEPKSCDTPPPCPRCPEPKSCDTPPPCP

SEQ ID NO: 3135 - protein, 38 aa, synthetic construct
  REGION 1..38: note = Synthetic Peptide
DTPPPCPRCPEPKSCDTPPPCPRCPEPKSCDTPPPCPR

SEQ ID NO: 3136 - protein, 38 aa, synthetic construct
  REGION 1..38: note = Synthetic Peptide
TPPPCPRCPEPKSCDTPPPCPRCPEPKSCDTPPPCPRC

SEQ ID NO: 3137 - protein, 38 aa, synthetic construct
  REGION 1..38: note = Synthetic Peptide
PPPCPRCPEPKSCDTPPPCPRCPEPKSCDTPPPCPRCP

SEQ ID NO: 3138 - protein, 37 aa, synthetic construct
  REGION 1..37: note = Synthetic Peptide
ELKTPLGDTTHTCPRCPEPKSCDTPPPCPRCPEPKSC

SEQ ID NO: 3139 - protein, 37 aa, synthetic construct
  REGION 1..37: note = Synthetic Peptide
LKTPLGDTTHTCPRCPEPKSCDTPPPCPRCPEPKSCD

SEQ ID NO: 3140 - protein, 37 aa, synthetic construct
  REGION 1..37: note = Synthetic Peptide
KTPLGDTTHTCPRCPEPKSCDTPPPCPRCPEPKSCDT

SEQ ID NO: 3141 - protein, 37 aa, synthetic construct
  REGION 1..37: note = Synthetic Peptide
TPLGDTTHTCPRCPEPKSCDTPPPCPRCPEPKSCDTP

SEQ ID NO: 3142 - protein, 37 aa, synthetic construct
  REGION 1..37: note = Synthetic Peptide
PLGDTTHTCPRCPEPKSCDTPPPCPRCPEPKSCDTPP

SEQ ID NO: 3143 - protein, 37 aa, synthetic construct
  REGION 1..37: note = Synthetic Peptide
LGDTTHTCPRCPEPKSCDTPPPCPRCPEPKSCDTPPP

SEQ ID NO: 3144 - protein, 37 aa, synthetic construct
  REGION 1..37: note = Synthetic Peptide
GDTTHTCPRCPEPKSCDTPPPCPRCPEPKSCDTPPPC

SEQ ID NO: 3145 - protein, 37 aa, synthetic construct
  REGION 1..37: note = Synthetic Peptide
DTTHTCPRCPEPKSCDTPPPCPRCPEPKSCDTPPPCP

SEQ ID NO: 3146 - protein, 37 aa, synthetic construct
  REGION 1..37: note = Synthetic Peptide
TTHTCPRCPEPKSCDTPPPCPRCPEPKSCDTPPPCPR

SEQ ID NO: 3147 - protein, 37 aa, synthetic construct
  REGION 1..37: note = Synthetic Peptide
THTCPRCPEPKSCDTPPPCPRCPEPKSCDTPPPCPRC

SEQ ID NO: 3148 - protein, 37 aa, synthetic construct
  REGION 1..37: note = Synthetic Peptide
HTCPRCPEPKSCDTPPPCPRCPEPKSCDTPPPCPRCP

SEQ ID NO: 3149 - protein, 37 aa, synthetic construct
  REGION 1..37: note = Synthetic Peptide
TCPRCPEPKSCDTPPPCPRCPEPKSCDTPPPCPRCPE

SEQ ID NO: 3150 - protein, 37 aa, synthetic construct
  REGION 1..37: note = Synthetic Peptide
CPRCPEPKSCDTPPPCPRCPEPKSCDTPPPCPRCPEP

SEQ ID NO: 3151 - protein, 37 aa, synthetic construct
  REGION 1..37: note = Synthetic Peptide
PRCPEPKSCDTPPPCPRCPEPKSCDTPPPCPRCPEPK

SEQ ID NO: 3152 - protein, 37 aa, synthetic construct
  REGION 1..37: note = Synthetic Peptide
RCPEPKSCDTPPPCPRCPEPKSCDTPPPCPRCPEPKS

SEQ ID NO: 3153 - protein, 37 aa, synthetic construct
  REGION 1..37: note = Synthetic Peptide
CPEPKSCDTPPPCPRCPEPKSCDTPPPCPRCPEPKSC

SEQ ID NO: 3154 - protein, 37 aa, synthetic construct
  REGION 1..37: note = Synthetic Peptide
PEPKSCDTPPPCPRCPEPKSCDTPPPCPRCPEPKSCD

SEQ ID NO: 3155 - protein, 37 aa, synthetic construct
  REGION 1..37: note = Synthetic Peptide
EPKSCDTPPPCPRCPEPKSCDTPPPCPRCPEPKSCDT

SEQ ID NO: 3156 - protein, 37 aa, synthetic construct
  REGION 1..37: note = Synthetic Peptide
PKSCDTPPPCPRCPEPKSCDTPPPCPRCPEPKSCDTP

SEQ ID NO: 3157 - protein, 37 aa, synthetic construct
  REGION 1..37: note = Synthetic Peptide
KSCDTPPPCPRCPEPKSCDTPPPCPRCPEPKSCDTPP

SEQ ID NO: 3158 - protein, 37 aa, synthetic construct
  REGION 1..37: note = Synthetic Peptide
SCDTPPPCPRCPEPKSCDTPPPCPRCPEPKSCDTPPP

SEQ ID NO: 3159 - protein, 37 aa, synthetic construct
  REGION 1..37: note = Synthetic Peptide
CDTPPPCPRCPEPKSCDTPPPCPRCPEPKSCDTPPPC

SEQ ID NO: 3160 - protein, 37 aa, synthetic construct
  REGION 1..37: note = Synthetic Peptide
DTPPPCPRCPEPKSCDTPPPCPRCPEPKSCDTPPPCP

SEQ ID NO: 3161 - protein, 37 aa, synthetic construct
  REGION 1..37: note = Synthetic Peptide
TPPPCPRCPEPKSCDTPPPCPRCPEPKSCDTPPPCPR

SEQ ID NO: 3162 - protein, 37 aa, synthetic construct
  REGION 1..37: note = Synthetic Peptide
PPPCPRCPEPKSCDTPPPCPRCPEPKSCDTPPPCPRC

SEQ ID NO: 3163 - protein, 37 aa, synthetic construct
  REGION 1..37: note = Synthetic Peptide
PPCPRCPEPKSCDTPPPCPRCPEPKSCDTPPPCPRCP

SEQ ID NO: 3164 - protein, 36 aa, synthetic construct
  REGION 1..36: note = Synthetic Peptide
ELKTPLGDTTHTCPRCPEPKSCDTPPPCPRCPEPKS

SEQ ID NO: 3165 - protein, 36 aa, synthetic construct
  REGION 1..36: note = Synthetic Peptide
LKTPLGDTTHTCPRCPEPKSCDTPPPCPRCPEPKSC

SEQ ID NO: 3166 - protein, 36 aa, synthetic construct
  REGION 1..36: note = Synthetic Peptide
KTPLGDTTHTCPRCPEPKSCDTPPPCPRCPEPKSCD

SEQ ID NO: 3167 - protein, 36 aa, synthetic construct
  REGION 1..36: note = Synthetic Peptide
TPLGDTTHTCPRCPEPKSCDTPPPCPRCPEPKSCDT

SEQ ID NO: 3168 - protein, 36 aa, synthetic construct
  REGION 1..36: note = Synthetic Peptide
PLGDTTHTCPRCPEPKSCDTPPPCPRCPEPKSCDTP

SEQ ID NO: 3169 - protein, 36 aa, synthetic construct
  REGION 1..36: note = Synthetic Peptide
LGDTTHTCPRCPEPKSCDTPPPCPRCPEPKSCDTPP

SEQ ID NO: 3170 - protein, 36 aa, synthetic construct
  REGION 1..36: note = Synthetic Peptide
GDTTHTCPRCPEPKSCDTPPPCPRCPEPKSCDTPPP

SEQ ID NO: 3171 - protein, 36 aa, synthetic construct
  REGION 1..36: note = Synthetic Peptide
DTTHTCPRCPEPKSCDTPPPCPRCPEPKSCDTPPPC

SEQ ID NO: 3172 - protein, 36 aa, synthetic construct
  REGION 1..36: note = Synthetic Peptide
TTHTCPRCPEPKSCDTPPPCPRCPEPKSCDTPPPCP

SEQ ID NO: 3173 - protein, 36 aa, synthetic construct
  REGION 1..36: note = Synthetic Peptide
THTCPRCPEPKSCDTPPPCPRCPEPKSCDTPPPCPR

SEQ ID NO: 3174 - protein, 36 aa, synthetic construct
  REGION 1..36: note = Synthetic Peptide
HTCPRCPEPKSCDTPPPCPRCPEPKSCDTPPPCPRC

SEQ ID NO: 3175 - protein, 36 aa, synthetic construct
  REGION 1..36: note = Synthetic Peptide
TCPRCPEPKSCDTPPPCPRCPEPKSCDTPPPCPRCP

SEQ ID NO: 3176 - protein, 36 aa, synthetic construct
  REGION 1..36: note = Synthetic Peptide
CPRCPEPKSCDTPPPCPRCPEPKSCDTPPPCPRCPE

SEQ ID NO: 3177 - protein, 36 aa, synthetic construct
  REGION 1..36: note = Synthetic Peptide
PRCPEPKSCDTPPPCPRCPEPKSCDTPPPCPRCPEP

SEQ ID NO: 3178 - protein, 36 aa, synthetic construct
  REGION 1..36: note = Synthetic Peptide
RCPEPKSCDTPPPCPRCPEPKSCDTPPPCPRCPEPK

SEQ ID NO: 3179 - protein, 36 aa, synthetic construct
  REGION 1..36: note = Synthetic Peptide
CPEPKSCDTPPPCPRCPEPKSCDTPPPCPRCPEPKS

SEQ ID NO: 3180 - protein, 36 aa, synthetic construct
  REGION 1..36: note = Synthetic Peptide
PEPKSCDTPPPCPRCPEPKSCDTPPPCPRCPEPKSC

SEQ ID NO: 3181 - protein, 36 aa, synthetic construct
  REGION 1..36: note = Synthetic Peptide
EPKSCDTPPPCPRCPEPKSCDTPPPCPRCPEPKSCD

SEQ ID NO: 3182 - protein, 36 aa, synthetic construct
  REGION 1..36: note = Synthetic Peptide
PKSCDTPPPCPRCPEPKSCDTPPPCPRCPEPKSCDT

SEQ ID NO: 3183 - protein, 36 aa, synthetic construct
  REGION 1..36: note = Synthetic Peptide
KSCDTPPPCPRCPEPKSCDTPPPCPRCPEPKSCDTP

SEQ ID NO: 3184 - protein, 36 aa, synthetic construct
  REGION 1..36: note = Synthetic Peptide
SCDTPPPCPRCPEPKSCDTPPPCPRCPEPKSCDTPP

SEQ ID NO: 3185 - protein, 36 aa, synthetic construct
  REGION 1..36: note = Synthetic Peptide
CDTPPPCPRCPEPKSCDTPPPCPRCPEPKSCDTPPP

SEQ ID NO: 3186 - protein, 36 aa, synthetic construct
  REGION 1..36: note = Synthetic Peptide
DTPPPCPRCPEPKSCDTPPPCPRCPEPKSCDTPPPC

SEQ ID NO: 3187 - protein, 36 aa, synthetic construct
  REGION 1..36: note = Synthetic Peptide
TPPPCPRCPEPKSCDTPPPCPRCPEPKSCDTPPPCP

SEQ ID NO: 3188 - protein, 36 aa, synthetic construct
  REGION 1..36: note = Synthetic Peptide
PPPCPRCPEPKSCDTPPPCPRCPEPKSCDTPPPCPR

SEQ ID NO: 3189 - protein, 36 aa, synthetic construct
  REGION 1..36: note = Synthetic Peptide
PPCPRCPEPKSCDTPPPCPRCPEPKSCDTPPPCPRC

SEQ ID NO: 3190 - protein, 36 aa, synthetic construct
  REGION 1..36: note = Synthetic Peptide
PCPRCPEPKSCDTPPPCPRCPEPKSCDTPPPCPRCP

SEQ ID NO: 3191 - protein, 35 aa, synthetic construct
  REGION 1..35: note = Synthetic Peptide
ELKTPLGDTTHTCPRCPEPKSCDTPPPCPRCPEPK

SEQ ID NO: 3192 - protein, 35 aa, synthetic construct
  REGION 1..35: note = Synthetic Peptide
LKTPLGDTTHTCPRCPEPKSCDTPPPCPRCPEPKS

SEQ ID NO: 3193 - protein, 35 aa, synthetic construct
  REGION 1..35: note = Synthetic Peptide
KTPLGDTTHTCPRCPEPKSCDTPPPCPRCPEPKSC

SEQ ID NO: 3194 - protein, 35 aa, synthetic construct
  REGION 1..35: note = Synthetic Peptide
TPLGDTTHTCPRCPEPKSCDTPPPCPRCPEPKSCD

SEQ ID NO: 3195 - protein, 35 aa, synthetic construct
  REGION 1..35: note = Synthetic Peptide
PLGDTTHTCPRCPEPKSCDTPPPCPRCPEPKSCDT

SEQ ID NO: 3196 - protein, 35 aa, synthetic construct
  REGION 1..35: note = Synthetic Peptide
LGDTTHTCPRCPEPKSCDTPPPCPRCPEPKSCDTP

SEQ ID NO: 3197 - protein, 35 aa, synthetic construct
  REGION 1..35: note = Synthetic Peptide
GDTTHTCPRCPEPKSCDTPPPCPRCPEPKSCDTPP

SEQ ID NO: 3198 - protein, 35 aa, synthetic construct
  REGION 1..35: note = Synthetic Peptide
DTTHTCPRCPEPKSCDTPPPCPRCPEPKSCDTPPP

SEQ ID NO: 3199 - protein, 35 aa, synthetic construct
  REGION 1..35: note = Synthetic Peptide
TTHTCPRCPEPKSCDTPPPCPRCPEPKSCDTPPPC

SEQ ID NO: 3200 - protein, 35 aa, synthetic construct
  REGION 1..35: note = Synthetic Peptide
THTCPRCPEPKSCDTPPPCPRCPEPKSCDTPPPCP

SEQ ID NO: 3201 - protein, 35 aa, synthetic construct
  REGION 1..35: note = Synthetic Peptide
HTCPRCPEPKSCDTPPPCPRCPEPKSCDTPPPCPR

SEQ ID NO: 3202 - protein, 35 aa, synthetic construct
  REGION 1..35: note = Synthetic Peptide
TCPRCPEPKSCDTPPPCPRCPEPKSCDTPPPCPRC

SEQ ID NO: 3203 - protein, 35 aa, synthetic construct
  REGION 1..35: note = Synthetic Peptide
CPRCPEPKSCDTPPPCPRCPEPKSCDTPPPCPRCP

SEQ ID NO: 3204 - protein, 35 aa, synthetic construct
  REGION 1..35: note = Synthetic Peptide
PRCPEPKSCDTPPPCPRCPEPKSCDTPPPCPRCPE

SEQ ID NO: 3205 - protein, 35 aa, synthetic construct
  REGION 1..35: note = Synthetic Peptide
RCPEPKSCDTPPPCPRCPEPKSCDTPPPCPRCPEP

SEQ ID NO: 3206 - protein, 35 aa, synthetic construct
  REGION 1..35: note = Synthetic Peptide
CPEPKSCDTPPPCPRCPEPKSCDTPPPCPRCPEPK

SEQ ID NO: 3207 - protein, 35 aa, synthetic construct
  REGION 1..35: note = Synthetic Peptide
PEPKSCDTPPPCPRCPEPKSCDTPPPCPRCPEPKS

SEQ ID NO: 3208 - protein, 35 aa, synthetic construct
  REGION 1..35: note = Synthetic Peptide
EPKSCDTPPPCPRCPEPKSCDTPPPCPRCPEPKSC

SEQ ID NO: 3209 - protein, 35 aa, synthetic construct
  REGION 1..35: note = Synthetic Peptide
PKSCDTPPPCPRCPEPKSCDTPPPCPRCPEPKSCD

SEQ ID NO: 3210 - protein, 35 aa, synthetic construct
  REGION 1..35: note = Synthetic Peptide
KSCDTPPPCPRCPEPKSCDTPPPCPRCPEPKSCDT

SEQ ID NO: 3211 - protein, 35 aa, synthetic construct
  REGION 1..35: note = Synthetic Peptide
SCDTPPPCPRCPEPKSCDTPPPCPRCPEPKSCDTP

SEQ ID NO: 3212 - protein, 35 aa, synthetic construct
  REGION 1..35: note = Synthetic Peptide
CDTPPPCPRCPEPKSCDTPPPCPRCPEPKSCDTPP

SEQ ID NO: 3213 - protein, 35 aa, synthetic construct
  REGION 1..35: note = Synthetic Peptide
DTPPPCPRCPEPKSCDTPPPCPRCPEPKSCDTPPP

SEQ ID NO: 3214 - protein, 35 aa, synthetic construct
  REGION 1..35: note = Synthetic Peptide
TPPPCPRCPEPKSCDTPPPCPRCPEPKSCDTPPPC

SEQ ID NO: 3215 - protein, 35 aa, synthetic construct
  REGION 1..35: note = Synthetic Peptide
PPPCPRCPEPKSCDTPPPCPRCPEPKSCDTPPPCP

SEQ ID NO: 3216 - protein, 35 aa, synthetic construct
  REGION 1..35: note = Synthetic Peptide
PPCPRCPEPKSCDTPPPCPRCPEPKSCDTPPPCPR

SEQ ID NO: 3217 - protein, 35 aa, synthetic construct
  REGION 1..35: note = Synthetic Peptide
PCPRCPEPKSCDTPPPCPRCPEPKSCDTPPPCPRC

SEQ ID NO: 3218 - protein, 35 aa, synthetic construct; identical to SEQ ID NO: 3203
  REGION 1..35: note = Synthetic Peptide

SEQ ID NO: 3219 - protein, 34 aa, synthetic construct
  REGION 1..34: note = Synthetic Peptide
ELKTPLGDTTHTCPRCPEPKSCDTPPPCPRCPEP

SEQ ID NO: 3220 - protein, 34 aa, synthetic construct
  REGION 1..34: note = Synthetic Peptide
LKTPLGDTTHTCPRCPEPKSCDTPPPCPRCPEPK

SEQ ID NO: 3221 - protein, 34 aa, synthetic construct
  REGION 1..34: note = Synthetic Peptide
KTPLGDTTHTCPRCPEPKSCDTPPPCPRCPEPKS

SEQ ID NO: 3222 - protein, 34 aa, synthetic construct
  REGION 1..34: note = Synthetic Peptide
TPLGDTTHTCPRCPEPKSCDTPPPCPRCPEPKSC

SEQ ID NO: 3223 - protein, 34 aa, synthetic construct
  REGION 1..34: note = Synthetic Peptide
PLGDTTHTCPRCPEPKSCDTPPPCPRCPEPKSCD

SEQ ID NO: 3224 - protein, 34 aa, synthetic construct
  REGION 1..34: note = Synthetic Peptide
LGDTTHTCPRCPEPKSCDTPPPCPRCPEPKSCDT

SEQ ID NO: 3225 - protein, 34 aa, synthetic construct
  REGION 1..34: note = Synthetic Peptide
GDTTHTCPRCPEPKSCDTPPPCPRCPEPKSCDTP

SEQ ID NO: 3226 - protein, 34 aa, synthetic construct
  REGION 1..34: note = Synthetic Peptide
DTTHTCPRCPEPKSCDTPPPCPRCPEPKSCDTPP

SEQ ID NO: 3227 - protein, 34 aa, synthetic construct
  REGION 1..34: note = Synthetic Peptide
TTHTCPRCPEPKSCDTPPPCPRCPEPKSCDTPPP

SEQ ID NO: 3228 - protein, 34 aa, synthetic construct
  REGION 1..34: note = Synthetic Peptide
THTCPRCPEPKSCDTPPPCPRCPEPKSCDTPPPC

SEQ ID NO: 3229 - protein, 34 aa, synthetic construct
  REGION 1..34: note = Synthetic Peptide
HTCPRCPEPKSCDTPPPCPRCPEPKSCDTPPPCP

SEQ ID NO: 3230 - protein, 34 aa, synthetic construct
  REGION 1..34: note = Synthetic Peptide
TCPRCPEPKSCDTPPPCPRCPEPKSCDTPPPCPR

SEQ ID NO: 3231 - protein, 34 aa, synthetic construct
  REGION 1..34: note = Synthetic Peptide
CPRCPEPKSCDTPPPCPRCPEPKSCDTPPPCPRC

SEQ ID NO: 3232 - protein, 34 aa, synthetic construct
  REGION 1..34: note = Synthetic Peptide
PRCPEPKSCDTPPPCPRCPEPKSCDTPPPCPRCP

SEQ ID NO: 3233 - protein, 34 aa, synthetic construct
  REGION 1..34: note = Synthetic Peptide
RCPEPKSCDTPPPCPRCPEPKSCDTPPPCPRCPE

SEQ ID NO: 3234 - protein, 34 aa, synthetic construct
  REGION 1..34: note = Synthetic Peptide
CPEPKSCDTPPPCPRCPEPKSCDTPPPCPRCPEP

SEQ ID NO: 3235 - protein, 34 aa, synthetic construct
  REGION 1..34: note = Synthetic Peptide
PEPKSCDTPPPCPRCPEPKSCDTPPPCPRCPEPK

SEQ ID NO: 3236 - protein, 34 aa, synthetic construct
  REGION 1..34: note = Synthetic Peptide
EPKSCDTPPPCPRCPEPKSCDTPPPCPRCPEPKS

SEQ ID NO: 3237 - protein, 34 aa, synthetic construct
  REGION 1..34: note = Synthetic Peptide
PKSCDTPPPCPRCPEPKSCDTPPPCPRCPEPKSC

SEQ ID NO: 3238 - protein, 34 aa, synthetic construct
  REGION 1..34: note = Synthetic Peptide
KSCDTPPPCPRCPEPKSCDTPPPCPRCPEPKSCD

SEQ ID NO: 3239 - protein, 34 aa, synthetic construct
  REGION 1..34: note = Synthetic Peptide
SCDTPPPCPRCPEPKSCDTPPPCPRCPEPKSCDT

SEQ ID NO: 3240 - protein, 34 aa, synthetic construct
  REGION 1..34: note = Synthetic Peptide
CDTPPPCPRCPEPKSCDTPPPCPRCPEPKSCDTP

SEQ ID NO: 3241 - protein, 34 aa, synthetic construct
  REGION 1..34: note = Synthetic Peptide
DTPPPCPRCPEPKSCDTPPPCPRCPEPKSCDTPP

SEQ ID NO: 3242 - protein, 34 aa, synthetic construct
  REGION 1..34: note = Synthetic Peptide
TPPPCPRCPEPKSCDTPPPCPRCPEPKSCDTPPP

SEQ ID NO: 3243 - protein, 34 aa, synthetic construct
  REGION 1..34: note = Synthetic Peptide
PPPCPRCPEPKSCDTPPPCPRCPEPKSCDTPPPC

SEQ ID NO: 3244 - protein, 34 aa, synthetic construct
  REGION 1..34: note = Synthetic Peptide
PPCPRCPEPKSCDTPPPCPRCPEPKSCDTPPPCP

SEQ ID NO: 3245 - protein, 34 aa, synthetic construct
  REGION 1..34: note = Synthetic Peptide
PCPRCPEPKSCDTPPPCPRCPEPKSCDTPPPCPR

SEQ ID NO: 3246 - protein, 34 aa, synthetic construct; identical to SEQ ID NO: 3231
  REGION 1..34: note = Synthetic Peptide

SEQ ID NO: 3247 - protein, 34 aa, synthetic construct; identical to SEQ ID NO: 3232
  REGION 1..34: note = Synthetic Peptide

SEQ ID NO: 3248 - protein, 33 aa, synthetic construct
  REGION 1..33: note = Synthetic Peptide
ELKTPLGDTTHTCPRCPEPKSCDTPPPCPRCPE

SEQ ID NO: 3249 - protein, 33 aa, synthetic construct
  REGION 1..33: note = Synthetic Peptide
LKTPLGDTTHTCPRCPEPKSCDTPPPCPRCPEP

SEQ ID NO: 3250 - protein, 33 aa, synthetic construct
  REGION 1..33: note = Synthetic Peptide
KTPLGDTTHTCPRCPEPKSCDTPPPCPRCPEPK

SEQ ID NO: 3251 - protein, 33 aa, synthetic construct
  REGION 1..33: note = Synthetic Peptide
TPLGDTTHTCPRCPEPKSCDTPPPCPRCPEPKS

SEQ ID NO: 3252 - protein, 33 aa, synthetic construct
  REGION 1..33: note = Synthetic Peptide
PLGDTTHTCPRCPEPKSCDTPPPCPRCPEPKSC

SEQ ID NO: 3253 - protein, 33 aa, synthetic construct
  REGION 1..33: note = Synthetic Peptide
LGDTTHTCPRCPEPKSCDTPPPCPRCPEPKSCD

SEQ ID NO: 3254 - protein, 33 aa, synthetic construct
  REGION 1..33: note = Synthetic Peptide
GDTTHTCPRCPEPKSCDTPPPCPRCPEPKSCDT

SEQ ID NO: 3255 - protein, 33 aa, synthetic construct
  REGION 1..33: note = Synthetic Peptide
DTTHTCPRCPEPKSCDTPPPCPRCPEPKSCDTP

SEQ ID NO: 3256 - protein, 33 aa, synthetic construct
  REGION 1..33: note = Synthetic Peptide
TTHTCPRCPEPKSCDTPPPCPRCPEPKSCDTPP

SEQ ID NO: 3257 - protein, 33 aa, synthetic construct
  REGION 1..33: note = Synthetic Peptide
THTCPRCPEPKSCDTPPPCPRCPEPKSCDTPPP

SEQ ID NO: 3258 - protein, 33 aa, synthetic construct
  REGION 1..33: note = Synthetic Peptide
HTCPRCPEPKSCDTPPPCPRCPEPKSCDTPPPC

SEQ ID NO: 3259 - protein, 33 aa, synthetic construct
  REGION 1..33: note = Synthetic Peptide
TCPRCPEPKSCDTPPPCPRCPEPKSCDTPPPCP

SEQ ID NO: 3260 - protein, 33 aa, synthetic construct
  REGION 1..33: note = Synthetic Peptide
CPRCPEPKSCDTPPPCPRCPEPKSCDTPPPCPR

SEQ ID NO: 3261 - protein, 33 aa, synthetic construct
  REGION 1..33: note = Synthetic Peptide
PRCPEPKSCDTPPPCPRCPEPKSCDTPPPCPRC

SEQ ID NO: 3262 - protein, 33 aa, synthetic construct
  REGION 1..33: note = Synthetic Peptide
RCPEPKSCDTPPPCPRCPEPKSCDTPPPCPRCP

SEQ ID NO: 3263 - protein, 33 aa, synthetic construct
  REGION 1..33: note = Synthetic Peptide
CPEPKSCDTPPPCPRCPEPKSCDTPPPCPRCPE

SEQ ID NO: 3264 - protein, 33 aa, synthetic construct
  REGION 1..33: note = Synthetic Peptide
PEPKSCDTPPPCPRCPEPKSCDTPPPCPRCPEP

SEQ ID NO: 3265 - protein, 33 aa, synthetic construct
  REGION 1..33: note = Synthetic Peptide
EPKSCDTPPPCPRCPEPKSCDTPPPCPRCPEPK

SEQ ID NO: 3266 - protein, 33 aa, synthetic construct
  REGION 1..33: note = Synthetic Peptide
PKSCDTPPPCPRCPEPKSCDTPPPCPRCPEPKS

SEQ ID NO: 3267 - protein, 33 aa, synthetic construct
  REGION 1..33: note = Synthetic Peptide
KSCDTPPPCPRCPEPKSCDTPPPCPRCPEPKSC

SEQ ID NO: 3268 - protein, 33 aa, synthetic construct
  REGION 1..33: note = Synthetic Peptide
SCDTPPPCPRCPEPKSCDTPPPCPRCPEPKSCD

SEQ ID NO: 3269 - protein, 33 aa, synthetic construct
  REGION 1..33: note = Synthetic Peptide
CDTPPPCPRCPEPKSCDTPPPCPRCPEPKSCDT

SEQ ID NO: 3270 - protein, 33 aa, synthetic construct
  REGION 1..33: note = Synthetic Peptide
DTPPPCPRCPEPKSCDTPPPCPRCPEPKSCDTP

SEQ ID NO: 3271 - protein, 33 aa, synthetic construct
  REGION 1..33: note = Synthetic Peptide
TPPPCPRCPEPKSCDTPPPCPRCPEPKSCDTPP

SEQ ID NO: 3272 - protein, 33 aa, synthetic construct
  REGION 1..33: note = Synthetic Peptide
PPPCPRCPEPKSCDTPPPCPRCPEPKSCDTPPP

SEQ ID NO: 3273 - protein, 33 aa, synthetic construct
  REGION 1..33: note = Synthetic Peptide
PPCPRCPEPKSCDTPPPCPRCPEPKSCDTPPPC

SEQ ID NO: 3274 - protein, 33 aa, synthetic construct
  REGION 1..33: note = Synthetic Peptide
PCPRCPEPKSCDTPPPCPRCPEPKSCDTPPPCP

SEQ ID NO: 3275 - protein, 33 aa, synthetic construct; identical to SEQ ID NO: 3260
  REGION 1..33: note = Synthetic Peptide

SEQ ID NO: 3276 - protein, 33 aa, synthetic construct; identical to SEQ ID NO: 3261
  REGION 1..33: note = Synthetic Peptide

SEQ ID NO: 3277 - protein, 33 aa, synthetic construct; identical to SEQ ID NO: 3262
  REGION 1..33: note = Synthetic Peptide

SEQ ID NO: 3278 - protein, 32 aa, synthetic construct
  REGION 1..32: note = Synthetic Peptide
ELKTPLGDTTHTCPRCPEPKSCDTPPPCPRCP

SEQ ID NO: 3279 - protein, 32 aa, synthetic construct
  REGION 1..32: note = Synthetic Peptide
LKTPLGDTTHTCPRCPEPKSCDTPPPCPRCPE

SEQ ID NO: 3280 - protein, 32 aa, synthetic construct
  REGION 1..32: note = Synthetic Peptide
KTPLGDTTHTCPRCPEPKSCDTPPPCPRCPEP

SEQ ID NO: 3281 - protein, 32 aa, synthetic construct
  REGION 1..32: note = Synthetic Peptide
TPLGDTTHTCPRCPEPKSCDTPPPCPRCPEPK

SEQ ID NO: 3282 - protein, 32 aa, synthetic construct
  REGION 1..32: note = Synthetic Peptide
PLGDTTHTCPRCPEPKSCDTPPPCPRCPEPKS

SEQ ID NO: 3283 - protein, 32 aa, synthetic construct
  REGION 1..32: note = Synthetic Peptide
LGDTTHTCPRCPEPKSCDTPPPCPRCPEPKSC

SEQ ID NO: 3284 - protein, 32 aa, synthetic construct
  REGION 1..32: note = Synthetic Peptide
GDTTHTCPRCPEPKSCDTPPPCPRCPEPKSCD

SEQ ID NO: 3285 - protein, 32 aa, synthetic construct
  REGION 1..32: note = Synthetic Peptide
DTTHTCPRCPEPKSCDTPPPCPRCPEPKSCDT

SEQ ID NO: 3286 - protein, 32 aa, synthetic construct
  REGION 1..32: note = Synthetic Peptide
TTHTCPRCPEPKSCDTPPPCPRCPEPKSCDTP

SEQ ID NO: 3287 - protein, 32 aa, synthetic construct
  REGION 1..32: note = Synthetic Peptide
THTCPRCPEPKSCDTPPPCPRCPEPKSCDTPP

SEQ ID NO: 3288 - protein, 32 aa, synthetic construct
  REGION 1..32: note = Synthetic Peptide
HTCPRCPEPKSCDTPPPCPRCPEPKSCDTPPP

SEQ ID NO: 3289 - protein, 32 aa, synthetic construct
  REGION 1..32: note = Synthetic Peptide
TCPRCPEPKSCDTPPPCPRCPEPKSCDTPPPC

SEQ ID NO: 3290 - protein, 32 aa, synthetic construct
  REGION 1..32: note = Synthetic Peptide
CPRCPEPKSCDTPPPCPRCPEPKSCDTPPPCP

SEQ ID NO: 3291 - protein, 32 aa, synthetic construct
  REGION 1..32: note = Synthetic Peptide
PRCPEPKSCDTPPPCPRCPEPKSCDTPPPCPR

SEQ ID NO: 3292 - protein, 32 aa, synthetic construct
  REGION 1..32: note = Synthetic Peptide
RCPEPKSCDTPPPCPRCPEPKSCDTPPPCPRC

SEQ ID NO: 3293 - protein, 32 aa, synthetic construct
  REGION 1..32: note = Synthetic Peptide
CPEPKSCDTPPPCPRCPEPKSCDTPPPCPRCP

SEQ ID NO: 3294 - protein, 32 aa, synthetic construct
  REGION 1..32: note = Synthetic Peptide
PEPKSCDTPPPCPRCPEPKSCDTPPPCPRCPE

SEQ ID NO: 3295 - protein, 32 aa, synthetic construct
  REGION 1..32: note = Synthetic Peptide
EPKSCDTPPPCPRCPEPKSCDTPPPCPRCPEP

SEQ ID NO: 3296 - protein, 32 aa, synthetic construct
  REGION 1..32: note = Synthetic Peptide
PKSCDTPPPCPRCPEPKSCDTPPPCPRCPEPK

SEQ ID NO: 3297 - protein, 32 aa, synthetic construct
  REGION 1..32: note = Synthetic Peptide
KSCDTPPPCPRCPEPKSCDTPPPCPRCPEPKS

SEQ ID NO: 3298 - protein, 32 aa, synthetic construct
  REGION 1..32: note = Synthetic Peptide
SCDTPPPCPRCPEPKSCDTPPPCPRCPEPKSC

SEQ ID NO: 3299 - protein, 32 aa, synthetic construct
  REGION 1..32: note = Synthetic Peptide
CDTPPPCPRCPEPKSCDTPPPCPRCPEPKSCD

SEQ ID NO: 3300 - protein, 32 aa, synthetic construct
  REGION 1..32: note = Synthetic Peptide
DTPPPCPRCPEPKSCDTPPPCPRCPEPKSCDT

SEQ ID NO: 3301 - protein, 32 aa, synthetic construct
  REGION 1..32: note = Synthetic Peptide
TPPPCPRCPEPKSCDTPPPCPRCPEPKSCDTP

SEQ ID NO: 3302 - protein, 32 aa, synthetic construct
  REGION 1..32: note = Synthetic Peptide
PPPCPRCPEPKSCDTPPPCPRCPEPKSCDTPP

SEQ ID NO: 3303 - protein, 32 aa, synthetic construct
  REGION 1..32: note = Synthetic Peptide
PPCPRCPEPKSCDTPPPCPRCPEPKSCDTPPP

SEQ ID NO: 3304 - protein, 32 aa, synthetic construct
  REGION 1..32: note = Synthetic Peptide
PCPRCPEPKSCDTPPPCPRCPEPKSCDTPPPC

SEQ ID NO: 3305 - protein, 32 aa, synthetic construct; identical to SEQ ID NO: 3290
  REGION 1..32: note = Synthetic Peptide

SEQ ID NO: 3306 - protein, 32 aa, synthetic construct; identical to SEQ ID NO: 3291
  REGION 1..32: note = Synthetic Peptide

SEQ ID NO: 3307 - protein, 32 aa, synthetic construct; identical to SEQ ID NO: 3292
  REGION 1..32: note = Synthetic Peptide

SEQ ID NO: 3308 - protein, 32 aa, synthetic construct; identical to SEQ ID NO: 3293
  REGION 1..32: note = Synthetic Peptide

SEQ ID NO: 3309 - protein, 31 aa, synthetic construct
  REGION 1..31: note = Synthetic Peptide
ELKTPLGDTTHTCPRCPEPKSCDTPPPCPRC

SEQ ID NO: 3310 - protein, 31 aa, synthetic construct
  REGION 1..31: note = Synthetic Peptide
LKTPLGDTTHTCPRCPEPKSCDTPPPCPRCP

SEQ ID NO: 3311 - protein, 31 aa, synthetic construct
  REGION 1..31: note = Synthetic Peptide
KTPLGDTTHTCPRCPEPKSCDTPPPCPRCPE

SEQ ID NO: 3312 - protein, 31 aa, synthetic construct
  REGION 1..31: note = Synthetic Peptide
TPLGDTTHTCPRCPEPKSCDTPPPCPRCPEP

SEQ ID NO: 3313 - protein, 31 aa, synthetic construct
  REGION 1..31: note = Synthetic Peptide
PLGDTTHTCPRCPEPKSCDTPPPCPRCPEPK

SEQ ID NO: 3314 - protein, 31 aa, synthetic construct
  REGION 1..31: note = Synthetic Peptide
LGDTTHTCPRCPEPKSCDTPPPCPRCPEPKS

SEQ ID NO: 3315 - protein, 31 aa, synthetic construct
  REGION 1..31: note = Synthetic Peptide
GDTTHTCPRCPEPKSCDTPPPCPRCPEPKSC

SEQ ID NO: 3316 - protein, 31 aa, synthetic construct
  REGION 1..31: note = Synthetic Peptide
DTTHTCPRCPEPKSCDTPPPCPRCPEPKSCD

SEQ ID NO: 3317 - protein, 31 aa, synthetic construct
  REGION 1..31: note = Synthetic Peptide
TTHTCPRCPEPKSCDTPPPCPRCPEPKSCDT

SEQ ID NO: 3318 - protein, 31 aa, synthetic construct
  REGION 1..31: note = Synthetic Peptide
THTCPRCPEPKSCDTPPPCPRCPEPKSCDTP

SEQ ID NO: 3319 - protein, 31 aa, synthetic construct
  REGION 1..31: note = Synthetic Peptide
HTCPRCPEPKSCDTPPPCPRCPEPKSCDTPP

SEQ ID NO: 3320 - protein, 31 aa, synthetic construct
  REGION 1..31: note = Synthetic Peptide
TCPRCPEPKSCDTPPPCPRCPEPKSCDTPPP

SEQ ID NO: 3321 - protein, 31 aa, synthetic construct
  REGION 1..31: note = Synthetic Peptide
CPRCPEPKSCDTPPPCPRCPEPKSCDTPPPC

SEQ ID NO: 3322 - protein, 31 aa, synthetic construct
  REGION 1..31: note = Synthetic Peptide
PRCPEPKSCDTPPPCPRCPEPKSCDTPPPCP

SEQ ID NO: 3323 - protein, 31 aa, synthetic construct
  REGION 1..31: note = Synthetic Peptide
RCPEPKSCDTPPPCPRCPEPKSCDTPPPCPR

SEQ ID NO: 3324 - protein, 31 aa, synthetic construct
  REGION 1..31: note = Synthetic Peptide
CPEPKSCDTPPPCPRCPEPKSCDTPPPCPRC

SEQ ID NO: 3325 - protein, 31 aa, synthetic construct
  REGION 1..31: note = Synthetic Peptide
PEPKSCDTPPPCPRCPEPKSCDTPPPCPRCP

SEQ ID NO: 3326 - protein, 31 aa, synthetic construct
  REGION 1..31: note = Synthetic Peptide
EPKSCDTPPPCPRCPEPKSCDTPPPCPRCPE

SEQ ID NO: 3327 - protein, 31 aa, synthetic construct
  REGION 1..31: note = Synthetic Peptide
PKSCDTPPPCPRCPEPKSCDTPPPCPRCPEP

SEQ ID NO: 3328 - protein, 31 aa, synthetic construct
  REGION 1..31: note = Synthetic Peptide
KSCDTPPPCPRCPEPKSCDTPPPCPRCPEPK

SEQ ID NO: 3329 - protein, 31 aa, synthetic construct
  REGION 1..31: note = Synthetic Peptide
SCDTPPPCPRCPEPKSCDTPPPCPRCPEPKS

SEQ ID NO: 3330 - protein, 31 aa, synthetic construct
  REGION 1..31: note = Synthetic Peptide
CDTPPPCPRCPEPKSCDTPPPCPRCPEPKSC

SEQ ID NO: 3331 - protein, 31 aa, synthetic construct
  REGION 1..31: note = Synthetic Peptide
DTPPPCPRCPEPKSCDTPPPCPRCPEPKSCD

SEQ ID NO: 3332 - protein, 31 aa, synthetic construct
  REGION 1..31: note = Synthetic Peptide
TPPPCPRCPEPKSCDTPPPCPRCPEPKSCDT

SEQ ID NO: 3333 - protein, 31 aa, synthetic construct
  REGION 1..31: note = Synthetic Peptide
PPPCPRCPEPKSCDTPPPCPRCPEPKSCDTP

SEQ ID NO: 3334 - protein, 31 aa, synthetic construct
  REGION 1..31: note = Synthetic Peptide
PPCPRCPEPKSCDTPPPCPRCPEPKSCDTPP

SEQ ID NO: 3335 - protein, 31 aa, synthetic construct
  REGION 1..31: note = Synthetic Peptide
PCPRCPEPKSCDTPPPCPRCPEPKSCDTPPP

SEQ ID NO: 3336 - protein, 31 aa, synthetic construct; identical to SEQ ID NO: 3321
  REGION 1..31: note = Synthetic Peptide

SEQ ID NO: 3337 - protein, 31 aa, synthetic construct; identical to SEQ ID NO: 3322
  REGION 1..31: note = Synthetic Peptide

SEQ ID NO: 3338 - protein, 31 aa, synthetic construct; identical to SEQ ID NO: 3323
  REGION 1..31: note = Synthetic Peptide

SEQ ID NO: 3339 - protein, 31 aa, synthetic construct; identical to SEQ ID NO: 3324
  REGION 1..31: note = Synthetic Peptide

SEQ ID NO: 3340 - protein, 31 aa, synthetic construct; identical to SEQ ID NO: 3325
  REGION 1..31: note = Synthetic Peptide

SEQ ID NO: 3341 - protein, 30 aa, synthetic construct
  REGION 1..30: note = Synthetic Peptide
ELKTPLGDTTHTCPRCPEPKSCDTPPPCPR

SEQ ID NO: 3342 - protein, 30 aa, synthetic construct
  REGION 1..30: note = Synthetic Peptide
LKTPLGDTTHTCPRCPEPKSCDTPPPCPRC

SEQ ID NO: 3343 - protein, 30 aa, synthetic construct
  REGION 1..30: note = Synthetic Peptide
KTPLGDTTHTCPRCPEPKSCDTPPPCPRCP

SEQ ID NO: 3344 - protein, 30 aa, synthetic construct
  REGION 1..30: note = Synthetic Peptide
TPLGDTTHTCPRCPEPKSCDTPPPCPRCPE

SEQ ID NO: 3345 - protein, 30 aa, synthetic construct
  REGION 1..30: note = Synthetic Peptide
PLGDTTHTCPRCPEPKSCDTPPPCPRCPEP

SEQ ID NO: 3346 - protein, 30 aa, synthetic construct
  REGION 1..30: note = Synthetic Peptide
LGDTTHTCPRCPEPKSCDTPPPCPRCPEPK

SEQ ID NO: 3347 - protein, 30 aa, synthetic construct
  REGION 1..30: note = Synthetic Peptide
GDTTHTCPRCPEPKSCDTPPPCPRCPEPKS

SEQ ID NO: 3348 - protein, 30 aa, synthetic construct
  REGION 1..30: note = Synthetic Peptide
DTTHTCPRCPEPKSCDTPPPCPRCPEPKSC

SEQ ID NO: 3349 - protein, 30 aa, synthetic construct
  REGION 1..30: note = Synthetic Peptide
TTHTCPRCPEPKSCDTPPPCPRCPEPKSCD

SEQ ID NO: 3350 - protein, 30 aa, synthetic construct
  REGION 1..30: note = Synthetic Peptide
THTCPRCPEPKSCDTPPPCPRCPEPKSCDT

SEQ ID NO: 3351 - protein, 30 aa, synthetic construct
  REGION 1..30: note = Synthetic Peptide
HTCPRCPEPKSCDTPPPCPRCPEPKSCDTP

SEQ ID NO: 3352 - protein, 30 aa, synthetic construct
  REGION 1..30: note = Synthetic Peptide
TCPRCPEPKSCDTPPPCPRCPEPKSCDTPP

SEQ ID NO: 3353 - protein, 30 aa, synthetic construct
  REGION 1..30: note = Synthetic Peptide
CPRCPEPKSCDTPPPCPRCPEPKSCDTPPP

SEQ ID NO: 3354 - protein, 30 aa, synthetic construct
  REGION 1..30: note = Synthetic Peptide
PRCPEPKSCDTPPPCPRCPEPKSCDTPPPC

SEQ ID NO: 3355 - protein, 30 aa, synthetic construct
  REGION 1..30: note = Synthetic Peptide
RCPEPKSCDTPPPCPRCPEPKSCDTPPPCP

SEQ ID NO: 3356 - protein, 30 aa, synthetic construct
  REGION 1..30: note = Synthetic Peptide
CPEPKSCDTPPPCPRCPEPKSCDTPPPCPR

SEQ ID NO: 3357 - protein, 30 aa, synthetic construct
  REGION 1..30: note = Synthetic Peptide
PEPKSCDTPPPCPRCPEPKSCDTPPPCPRC

SEQ ID NO: 3358 - protein, 30 aa, synthetic construct
  REGION 1..30: note = Synthetic Peptide
EPKSCDTPPPCPRCPEPKSCDTPPPCPRCP

SEQ ID NO: 3359 - protein, 30 aa, synthetic construct
  REGION 1..30: note = Synthetic Peptide
PKSCDTPPPCPRCPEPKSCDTPPPCPRCPE

SEQ ID NO: 3360 - protein, 30 aa, synthetic construct
  REGION 1..30: note = Synthetic Peptide
KSCDTPPPCPRCPEPKSCDTPPPCPRCPEP

SEQ ID NO: 3361 - protein, 30 aa, synthetic construct
  REGION 1..30: note = Synthetic Peptide
SCDTPPPCPRCPEPKSCDTPPPCPRCPEPK

SEQ ID NO: 3362 - protein, 30 aa, synthetic construct
  REGION 1..30: note = Synthetic Peptide
CDTPPPCPRCPEPKSCDTPPPCPRCPEPKS

SEQ ID NO: 3363 - protein, 30 aa, synthetic construct
  REGION 1..30: note = Synthetic Peptide
DTPPPCPRCPEPKSCDTPPPCPRCPEPKSC

SEQ ID NO: 3364 - protein, 30 aa, synthetic construct
  REGION 1..30: note = Synthetic Peptide
TPPPCPRCPEPKSCDTPPPCPRCPEPKSCD

SEQ ID NO: 3365 - protein, 30 aa, synthetic construct
  REGION 1..30: note = Synthetic Peptide
PPPCPRCPEPKSCDTPPPCPRCPEPKSCDT

SEQ ID NO: 3366 - protein, 30 aa, synthetic construct
  REGION 1..30: note = Synthetic Peptide
PPCPRCPEPKSCDTPPPCPRCPEPKSCDTP

SEQ ID NO: 3367 - protein, 30 aa, synthetic construct
  REGION 1..30: note = Synthetic Peptide
PCPRCPEPKSCDTPPPCPRCPEPKSCDTPP

SEQ ID NO: 3368 - protein, 30 aa, synthetic construct; identical to SEQ ID NO: 3353
  REGION 1..30: note = Synthetic Peptide

SEQ ID NO: 3369 - protein, 30 aa, synthetic construct; identical to SEQ ID NO: 3354
  REGION 1..30: note = Synthetic Peptide

SEQ ID NO: 3370 - protein, 30 aa, synthetic construct; identical to SEQ ID NO: 3355
  REGION 1..30: note = Synthetic Peptide

SEQ ID NO: 3371 - protein, 30 aa, synthetic construct; identical to SEQ ID NO: 3356
  REGION 1..30: note = Synthetic Peptide

SEQ ID NO: 3372 - protein, 30 aa, synthetic construct; identical to SEQ ID NO: 3357
  REGION 1..30: note = Synthetic Peptide

SEQ ID NO: 3373 - protein, 30 aa, synthetic construct; identical to SEQ ID NO: 3358
  REGION 1..30: note = Synthetic Peptide

SEQ ID NO: 3374 - protein, 29 aa, synthetic construct
  REGION 1..29: note = Synthetic Peptide
ELKTPLGDTTHTCPRCPEPKSCDTPPPCP

SEQ ID NO: 3375 - protein, 29 aa, synthetic construct
  REGION 1..29: note = Synthetic Peptide
LKTPLGDTTHTCPRCPEPKSCDTPPPCPR

SEQ ID NO: 3376 - protein, 29 aa, synthetic construct
  REGION 1..29: note = Synthetic Peptide
KTPLGDTTHTCPRCPEPKSCDTPPPCPRC

SEQ ID NO: 3377 - protein, 29 aa, synthetic construct
  REGION 1..29: note = Synthetic Peptide
TPLGDTTHTCPRCPEPKSCDTPPPCPRCP

SEQ ID NO: 3378 - protein, 29 aa, synthetic construct
  REGION 1..29: note = Synthetic Peptide
PLGDTTHTCPRCPEPKSCDTPPPCPRCPE

SEQ ID NO: 3379 - protein, 29 aa, synthetic construct
  REGION 1..29: note = Synthetic Peptide
LGDTTHTCPRCPEPKSCDTPPPCPRCPEP

SEQ ID NO: 3380 - protein, 29 aa, synthetic construct
  REGION 1..29: note = Synthetic Peptide
GDTTHTCPRCPEPKSCDTPPPCPRCPEPK

SEQ ID NO: 3381 - protein, 29 aa, synthetic construct
  REGION 1..29: note = Synthetic Peptide
DTTHTCPRCPEPKSCDTPPPCPRCPEPKS

SEQ ID NO: 3382 - protein, 29 aa, synthetic construct
  REGION 1..29: note = Synthetic Peptide
TTHTCPRCPEPKSCDTPPPCPRCPEPKSC

SEQ ID NO: 3383 - protein, 29 aa, synthetic construct
  REGION 1..29: note = Synthetic Peptide
THTCPRCPEPKSCDTPPPCPRCPEPKSCD

SEQ ID NO: 3384 - protein, 29 aa, synthetic construct
  REGION 1..29: note = Synthetic Peptide
HTCPRCPEPKSCDTPPPCPRCPEPKSCDT

SEQ ID NO: 3385 - protein, 29 aa, synthetic construct
  REGION 1..29: note = Synthetic Peptide
TCPRCPEPKSCDTPPPCPRCPEPKSCDTP

SEQ ID NO: 3386 - protein, 29 aa, synthetic construct
  REGION 1..29: note = Synthetic Peptide
CPRCPEPKSCDTPPPCPRCPEPKSCDTPP

SEQ ID NO: 3387 - protein, 29 aa, synthetic construct
  REGION 1..29: note = Synthetic Peptide
PRCPEPKSCDTPPPCPRCPEPKSCDTPPP

SEQ ID NO: 3388 - protein, 29 aa, synthetic construct
  REGION 1..29: note = Synthetic Peptide
RCPEPKSCDTPPPCPRCPEPKSCDTPPPC

SEQ ID NO: 3389 - protein, 29 aa, synthetic construct
  REGION 1..29: note = Synthetic Peptide
CPEPKSCDTPPPCPRCPEPKSCDTPPPCP

SEQ ID NO: 3390 - protein, 29 aa, synthetic construct
  REGION 1..29: note = Synthetic Peptide
PEPKSCDTPPPCPRCPEPKSCDTPPPCPR

SEQ ID NO: 3391 - protein, 29 aa, synthetic construct
  REGION 1..29: note = Synthetic Peptide
EPKSCDTPPPCPRCPEPKSCDTPPPCPRC

SEQ ID NO: 3392 - protein, 29 aa, synthetic construct
  REGION 1..29: note = Synthetic Peptide
PKSCDTPPPCPRCPEPKSCDTPPPCPRCP

SEQ ID NO: 3393 - protein, 29 aa, synthetic construct
  REGION 1..29: note = Synthetic Peptide
KSCDTPPPCPRCPEPKSCDTPPPCPRCPE

SEQ ID NO: 3394 - protein, 29 aa, synthetic construct
  REGION 1..29: note = Synthetic Peptide
SCDTPPPCPRCPEPKSCDTPPPCPRCPEP

SEQ ID NO: 3395 - protein, 29 aa, synthetic construct
  REGION 1..29: note = Synthetic Peptide
CDTPPPCPRCPEPKSCDTPPPCPRCPEPK

SEQ ID NO: 3396 - protein, 29 aa, synthetic construct
  REGION 1..29: note = Synthetic Peptide
DTPPPCPRCPEPKSCDTPPPCPRCPEPKS

SEQ ID NO: 3397 - protein, 29 aa, synthetic construct
  REGION 1..29: note = Synthetic Peptide
TPPPCPRCPEPKSCDTPPPCPRCPEPKSC

SEQ ID NO: 3398 - protein, 29 aa, synthetic construct
  REGION 1..29: note = Synthetic Peptide
PPPCPRCPEPKSCDTPPPCPRCPEPKSCD

SEQ ID NO: 3399 - protein, 29 aa, synthetic construct
  REGION 1..29: note = Synthetic Peptide
PPCPRCPEPKSCDTPPPCPRCPEPKSCDT

SEQ ID NO: 3400 - protein, 29 aa, synthetic construct
  REGION 1..29: note = Synthetic Peptide
PCPRCPEPKSCDTPPPCPRCPEPKSCDTP

SEQ ID NO: 3401 - protein, 29 aa, synthetic construct
  REGION 1..29: note = Synthetic Peptide
CPRCPEPKSCDTPPPCPRCPEPKSCDTPP

SEQ ID NO: 3402 - protein, 29 aa, synthetic construct
  REGION 1..29: note = Synthetic Peptide
PRCPEPKSCDTPPPCPRCPEPKSCDTPPP

SEQ ID NO: 3403 - protein, 29 aa, synthetic construct
  REGION 1..29: note = Synthetic Peptide
RCPEPKSCDTPPPCPRCPEPKSCDTPPPC

SEQ ID NO: 3404 - protein, 29 aa, synthetic construct
  REGION 1..29: note = Synthetic Peptide
CPEPKSCDTPPPCPRCPEPKSCDTPPPCP

SEQ ID NO: 3405 - protein, 29 aa, synthetic construct
  REGION 1..29: note = Synthetic Peptide
PEPKSCDTPPPCPRCPEPKSCDTPPPCPR

SEQ ID NO: 3406 - protein, 29 aa, synthetic construct
  REGION 1..29: note = Synthetic Peptide
EPKSCDTPPPCPRCPEPKSCDTPPPCPRC

SEQ ID NO: 3407 - protein, 29 aa, synthetic construct
  REGION 1..29: note = Synthetic Peptide
PKSCDTPPPCPRCPEPKSCDTPPPCPRCP

SEQ ID NO: 3408 - protein, 28 aa, synthetic construct
  REGION 1..28: note = Synthetic Peptide
ELKTPLGDTTHTCPRCPEPKSCDTPPPC

SEQ ID NO: 3409 - protein, 28 aa, synthetic construct
  REGION 1..28: note = Synthetic Peptide
LKTPLGDTTHTCPRCPEPKSCDTPPPCP

SEQ ID NO: 3410 - protein, 28 aa, synthetic construct
  REGION 1..28: note = Synthetic Peptide
KTPLGDTTHTCPRCPEPKSCDTPPPCPR

SEQ ID NO: 3411 - protein, 28 aa, synthetic construct
  REGION 1..28: note = Synthetic Peptide
TPLGDTTHTCPRCPEPKSCDTPPPCPRC

SEQ ID NO: 3412 - protein, 28 aa, synthetic construct
  REGION 1..28: note = Synthetic Peptide
PLGDTTHTCPRCPEPKSCDTPPPCPRCP

SEQ ID NO: 3413 - protein, 28 aa, synthetic construct
  REGION 1..28: note = Synthetic Peptide
LGDTTHTCPRCPEPKSCDTPPPCPRCPE

SEQ ID NO: 3414 - protein, 28 aa, synthetic construct
  REGION 1..28: note = Synthetic Peptide
GDTTHTCPRCPEPKSCDTPPPCPRCPEP

SEQ ID NO: 3415 - protein, 28 aa, synthetic construct
  REGION 1..28: note = Synthetic Peptide
DTTHTCPRCPEPKSCDTPPPCPRCPEPK

SEQ ID NO: 3416 - protein, 28 aa, synthetic construct
  REGION 1..28: note = Synthetic Peptide
TTHTCPRCPEPKSCDTPPPCPRCPEPKS

SEQ ID NO: 3417 - protein, 28 aa, synthetic construct
  REGION 1..28: note = Synthetic Peptide
THTCPRCPEPKSCDTPPPCPRCPEPKSC

SEQ ID NO: 3418 - protein, 28 aa, synthetic construct
  REGION 1..28: note = Synthetic Peptide
HTCPRCPEPKSCDTPPPCPRCPEPKSCD

SEQ ID NO: 3419 - protein, 28 aa, synthetic construct
  REGION 1..28: note = Synthetic Peptide
TCPRCPEPKSCDTPPPCPRCPEPKSCDT

SEQ ID NO: 3420 - protein, 28 aa, synthetic construct
  REGION 1..28: note = Synthetic Peptide
CPRCPEPKSCDTPPPCPRCPEPKSCDTP

SEQ ID NO: 3421 - protein, 28 aa, synthetic construct
  REGION 1..28: note = Synthetic Peptide
PRCPEPKSCDTPPPCPRCPEPKSCDTPP

SEQ ID NO: 3422 - protein, 28 aa, synthetic construct
  REGION 1..28: note = Synthetic Peptide
RCPEPKSCDTPPPCPRCPEPKSCDTPPP

SEQ ID NO: 3423 - protein, 28 aa, synthetic construct
  REGION 1..28: note = Synthetic Peptide
CPEPKSCDTPPPCPRCPEPKSCDTPPPC

SEQ ID NO: 3424 - protein, 28 aa, synthetic construct
  REGION 1..28: note = Synthetic Peptide
PEPKSCDTPPPCPRCPEPKSCDTPPPCP

SEQ ID NO: 3425 - protein, 28 aa, synthetic construct
  REGION 1..28: note = Synthetic Peptide
EPKSCDTPPPCPRCPEPKSCDTPPPCPR

SEQ ID NO: 3426 - protein, 28 aa, synthetic construct
  REGION 1..28: note = Synthetic Peptide
PKSCDTPPPCPRCPEPKSCDTPPPCPRC

SEQ ID NO: 3427 - protein, 28 aa, synthetic construct
  REGION 1..28: note = Synthetic Peptide
KSCDTPPPCPRCPEPKSCDTPPPCPRCP

SEQ ID NO: 3428 - protein, 28 aa, synthetic construct
  REGION 1..28: note = Synthetic Peptide
SCDTPPPCPRCPEPKSCDTPPPCPRCPE

SEQ ID NO: 3429 - protein, 28 aa, synthetic construct
  REGION 1..28: note = Synthetic Peptide
CDTPPPCPRCPEPKSCDTPPPCPRCPEP

SEQ ID NO: 3430 - protein, 28 aa, synthetic construct
  REGION 1..28: note = Synthetic Peptide
DTPPPCPRCPEPKSCDTPPPCPRCPEPK

SEQ ID NO: 3431 - protein, 28 aa, synthetic construct
  REGION 1..28: note = Synthetic Peptide
TPPPCPRCPEPKSCDTPPPCPRCPEPKS

SEQ ID NO: 3432 - protein, 28 aa, synthetic construct
  REGION 1..28: note = Synthetic Peptide
PPPCPRCPEPKSCDTPPPCPRCPEPKSC

SEQ ID NO: 3433 - protein, 28 aa, synthetic construct
  REGION 1..28: note = Synthetic Peptide
PPCPRCPEPKSCDTPPPCPRCPEPKSCD

SEQ ID NO: 3434 - protein, 28 aa, synthetic construct
  REGION 1..28: note = Synthetic Peptide
PCPRCPEPKSCDTPPPCPRCPEPKSCDT

SEQ ID NO: 3435 - protein, 28 aa, synthetic construct
  REGION 1..28: note = Synthetic Peptide
CPRCPEPKSCDTPPPCPRCPEPKSCDTP

SEQ ID NO: 3436 - protein, 28 aa, synthetic construct
  REGION 1..28: note = Synthetic Peptide
PRCPEPKSCDTPPPCPRCPEPKSCDTPP

SEQ ID NO: 3437 - protein, 28 aa, synthetic construct
  REGION 1..28: note = Synthetic Peptide
RCPEPKSCDTPPPCPRCPEPKSCDTPPP

SEQ ID NO: 3438 - protein, 28 aa, synthetic construct
  REGION 1..28: note = Synthetic Peptide
CPEPKSCDTPPPCPRCPEPKSCDTPPPC

SEQ ID NO: 3439 - protein, 28 aa, synthetic construct
  REGION 1..28: note = Synthetic Peptide
PEPKSCDTPPPCPRCPEPKSCDTPPPCP

SEQ ID NO: 3440 - protein, 28 aa, synthetic construct
  REGION 1..28: note = Synthetic Peptide
EPKSCDTPPPCPRCPEPKSCDTPPPCPR

SEQ ID NO: 3441 - protein, 28 aa, synthetic construct
  REGION 1..28: note = Synthetic Peptide
PKSCDTPPPCPRCPEPKSCDTPPPCPRC

SEQ ID NO: 3442 - protein, 28 aa, synthetic construct
  REGION 1..28: note = Synthetic Peptide
KSCDTPPPCPRCPEPKSCDTPPPCPRCP

SEQ ID NO: 3443 - protein, 27 aa, synthetic construct
  REGION 1..27: note = Synthetic Peptide
ELKTPLGDTTHTCPRCPEPKSCDTPPP

SEQ ID NO: 3444 - protein, 27 aa, synthetic construct
  REGION 1..27: note = Synthetic Peptide
LKTPLGDTTHTCPRCPEPKSCDTPPPC

SEQ ID NO: 3445 - protein, 27 aa, synthetic construct
  REGION 1..27: note = Synthetic Peptide
KTPLGDTTHTCPRCPEPKSCDTPPPCP

SEQ ID NO: 3446 - protein, 27 aa, synthetic construct
  REGION 1..27: note = Synthetic Peptide
TPLGDTTHTCPRCPEPKSCDTPPPCPR

SEQ ID NO: 3447 - protein, 27 aa, synthetic construct
  REGION 1..27: note = Synthetic Peptide
PLGDTTHTCPRCPEPKSCDTPPPCPRC

SEQ ID NO: 3448 - protein, 27 aa, synthetic construct
  REGION 1..27: note = Synthetic Peptide
LGDTTHTCPRCPEPKSCDTPPPCPRCP

SEQ ID NO: 3449 - protein, 27 aa, synthetic construct
  REGION 1..27: note = Synthetic Peptide
GDTTHTCPRCPEPKSCDTPPPCPRCPE

SEQ ID NO: 3450 - protein, 27 aa, synthetic construct
  REGION 1..27: note = Synthetic Peptide
DTTHTCPRCPEPKSCDTPPPCPRCPEP

SEQ ID NO: 3451 - protein, 27 aa, synthetic construct
  REGION 1..27: note = Synthetic Peptide
TTHTCPRCPEPKSCDTPPPCPRCPEPK

SEQ ID NO: 3452 - protein, 27 aa, synthetic construct
  REGION 1..27: note = Synthetic Peptide
THTCPRCPEPKSCDTPPPCPRCPEPKS

SEQ ID NO: 3453 - protein, 27 aa, synthetic construct
  REGION 1..27: note = Synthetic Peptide
HTCPRCPEPKSCDTPPPCPRCPEPKSC

SEQ ID NO: 3454 - protein, 27 aa, synthetic construct
  REGION 1..27: note = Synthetic Peptide
TCPRCPEPKSCDTPPPCPRCPEPKSCD

SEQ ID NO: 3455 - protein, 27 aa, synthetic construct
  REGION 1..27: note = Synthetic Peptide
CPRCPEPKSCDTPPPCPRCPEPKSCDT

SEQ ID NO: 3456 - protein, 27 aa, synthetic construct
  REGION 1..27: note = Synthetic Peptide
PRCPEPKSCDTPPPCPRCPEPKSCDTP

SEQ ID NO: 3457 - protein, 27 aa, synthetic construct
  REGION 1..27: note = Synthetic Peptide
RCPEPKSCDTPPPCPRCPEPKSCDTPP

SEQ ID NO: 3458 - protein, 27 aa, synthetic construct
  REGION 1..27: note = Synthetic Peptide
CPEPKSCDTPPPCPRCPEPKSCDTPPP

SEQ ID NO: 3459 - protein, 27 aa, synthetic construct
  REGION 1..27: note = Synthetic Peptide
PEPKSCDTPPPCPRCPEPKSCDTPPPC

SEQ ID NO: 3460 - protein, 27 aa, synthetic construct
  REGION 1..27: note = Synthetic Peptide
EPKSCDTPPPCPRCPEPKSCDTPPPCP

SEQ ID NO: 3461 - protein, 27 aa, synthetic construct
  REGION 1..27: note = Synthetic Peptide
PKSCDTPPPCPRCPEPKSCDTPPPCPR

SEQ ID NO: 3462 - protein, 27 aa, synthetic construct
  REGION 1..27: note = Synthetic Peptide
KSCDTPPPCPRCPEPKSCDTPPPCPRC

SEQ ID NO: 3463 - protein, 27 aa, synthetic construct
  REGION 1..27: note = Synthetic Peptide
SCDTPPPCPRCPEPKSCDTPPPCPRCP

SEQ ID NO: 3464 - protein, 27 aa, synthetic construct
  REGION 1..27: note = Synthetic Peptide
CDTPPPCPRCPEPKSCDTPPPCPRCPE

SEQ ID NO: 3465 - protein, 27 aa, synthetic construct
  REGION 1..27: note = Synthetic Peptide
DTPPPCPRCPEPKSCDTPPPCPRCPEP

SEQ ID NO: 3466 - protein, 27 aa, synthetic construct
  REGION 1..27: note = Synthetic Peptide
TPPPCPRCPEPKSCDTPPPCPRCPEPK

SEQ ID NO: 3467 - protein, 27 aa, synthetic construct
  REGION 1..27: note = Synthetic Peptide
PPPCPRCPEPKSCDTPPPCPRCPEPKS

SEQ ID NO: 3468 - protein, 27 aa, synthetic construct
  REGION 1..27: note = Synthetic Peptide
PPCPRCPEPKSCDTPPPCPRCPEPKSC

SEQ ID NO: 3469 - protein, 27 aa, synthetic construct
  REGION 1..27: note = Synthetic Peptide
PCPRCPEPKSCDTPPPCPRCPEPKSCD

SEQ ID NO: 3470 - protein, 27 aa, synthetic construct
  REGION 1..27: note = Synthetic Peptide
CPRCPEPKSCDTPPPCPRCPEPKSCDT

SEQ ID NO: 3471 - protein, 27 aa, synthetic construct
  REGION 1..27: note = Synthetic Peptide
PRCPEPKSCDTPPPCPRCPEPKSCDTP

SEQ ID NO: 3472 - protein, 27 aa, synthetic construct
  REGION 1..27: note = Synthetic Peptide
RCPEPKSCDTPPPCPRCPEPKSCDTPP

SEQ ID NO: 3473 - protein, 27 aa, synthetic construct
  REGION 1..27: note = Synthetic Peptide
CPEPKSCDTPPPCPRCPEPKSCDTPPP

SEQ ID NO: 3474 - protein, 27 aa, synthetic construct
  REGION 1..27: note = Synthetic Peptide
PEPKSCDTPPPCPRCPEPKSCDTPPPC

SEQ ID NO: 3475 - protein, 27 aa, synthetic construct
  REGION 1..27: note = Synthetic Peptide
EPKSCDTPPPCPRCPEPKSCDTPPPCP

SEQ ID NO: 3476 - protein, 27 aa, synthetic construct
  REGION 1..27: note = Synthetic Peptide
PKSCDTPPPCPRCPEPKSCDTPPPCPR

SEQ ID NO: 3477 - protein, 27 aa, synthetic construct
  REGION 1..27: note = Synthetic Peptide
KSCDTPPPCPRCPEPKSCDTPPPCPRC

SEQ ID NO: 3478 - protein, 27 aa, synthetic construct
  REGION 1..27: note = Synthetic Peptide
SCDTPPPCPRCPEPKSCDTPPPCPRCP

SEQ ID NO: 3479 - protein, 26 aa, synthetic construct
  REGION 1..26: note = Synthetic Peptide
ELKTPLGDTTHTCPRCPEPKSCDTPP

SEQ ID NO: 3480 - protein, 26 aa, synthetic construct
  REGION 1..26: note = Synthetic Peptide
LKTPLGDTTHTCPRCPEPKSCDTPPP

SEQ ID NO: 3481 - protein, 26 aa, synthetic construct
  REGION 1..26: note = Synthetic Peptide
KTPLGDTTHTCPRCPEPKSCDTPPPC

SEQ ID NO: 3482 - protein, 26 aa, synthetic construct
  REGION 1..26: note = Synthetic Peptide
TPLGDTTHTCPRCPEPKSCDTPPPCP

SEQ ID NO: 3483 - protein, 26 aa, synthetic construct
  REGION 1..26: note = Synthetic Peptide
PLGDTTHTCPRCPEPKSCDTPPPCPR

SEQ ID NO: 3484 - protein, 26 aa, synthetic construct
  REGION 1..26: note = Synthetic Peptide
LGDTTHTCPRCPEPKSCDTPPPCPRC

SEQ ID NO: 3485 - protein, 26 aa, synthetic construct
  REGION 1..26: note = Synthetic Peptide
GDTTHTCPRCPEPKSCDTPPPCPRCP

SEQ ID NO: 3486 - protein, 26 aa, synthetic construct
  REGION 1..26: note = Synthetic Peptide
DTTHTCPRCPEPKSCDTPPPCPRCPE

SEQ ID NO: 3487 - protein, 26 aa, synthetic construct
  REGION 1..26: note = Synthetic Peptide
TTHTCPRCPEPKSCDTPPPCPRCPEP

SEQ ID NO: 3488 - protein, 26 aa, synthetic construct
  REGION 1..26: note = Synthetic Peptide
THTCPRCPEPKSCDTPPPCPRCPEPK

SEQ ID NO: 3489 - protein, 26 aa, synthetic construct
  REGION 1..26: note = Synthetic Peptide
HTCPRCPEPKSCDTPPPCPRCPEPKS

SEQ ID NO: 3490 - protein, 26 aa, synthetic construct
  REGION 1..26: note = Synthetic Peptide
TCPRCPEPKSCDTPPPCPRCPEPKSC

SEQ ID NO: 3491 - protein, 26 aa, synthetic construct
  REGION 1..26: note = Synthetic Peptide
CPRCPEPKSCDTPPPCPRCPEPKSCD

SEQ ID NO: 3492 - protein, 26 aa, synthetic construct
  REGION 1..26: note = Synthetic Peptide
PRCPEPKSCDTPPPCPRCPEPKSCDT

SEQ ID NO: 3493 - protein, 26 aa, synthetic construct
  REGION 1..26: note = Synthetic Peptide
RCPEPKSCDTPPPCPRCPEPKSCDTP

SEQ ID NO: 3494 - protein, 26 aa, synthetic construct
  REGION 1..26: note = Synthetic Peptide
CPEPKSCDTPPPCPRCPEPKSCDTPP

SEQ ID NO: 3495 - protein, 26 aa, synthetic construct
  REGION 1..26: note = Synthetic Peptide
PEPKSCDTPPPCPRCPEPKSCDTPPP

SEQ ID NO: 3496 - protein, 26 aa, synthetic construct
  REGION 1..26: note = Synthetic Peptide
EPKSCDTPPPCPRCPEPKSCDTPPPC

SEQ ID NO: 3497 - protein, 26 aa, synthetic construct
  REGION 1..26: note = Synthetic Peptide
PKSCDTPPPCPRCPEPKSCDTPPPCP

SEQ ID NO: 3498 - protein, 26 aa, synthetic construct
  REGION 1..26: note = Synthetic Peptide
KSCDTPPPCPRCPEPKSCDTPPPCPR

SEQ ID NO: 3499 - protein, 26 aa, synthetic construct
  REGION 1..26: note = Synthetic Peptide
SCDTPPPCPRCPEPKSCDTPPPCPRC

SEQ ID NO: 3500 - protein, 26 aa, synthetic construct
  REGION 1..26: note = Synthetic Peptide
CDTPPPCPRCPEPKSCDTPPPCPRCP

SEQ ID NO: 3501 - protein, 26 aa, synthetic construct
  REGION 1..26: note = Synthetic Peptide
DTPPPCPRCPEPKSCDTPPPCPRCPE

SEQ ID NO: 3502 - protein, 26 aa, synthetic construct
  REGION 1..26: note = Synthetic Peptide
TPPPCPRCPEPKSCDTPPPCPRCPEP

SEQ ID NO: 3503 - protein, 26 aa, synthetic construct
  REGION 1..26: note = Synthetic Peptide
PPPCPRCPEPKSCDTPPPCPRCPEPK

SEQ ID NO: 3504 - protein, 26 aa, synthetic construct
  REGION 1..26: note = Synthetic Peptide
PPCPRCPEPKSCDTPPPCPRCPEPKS

SEQ ID NO: 3505 - protein, 26 aa, synthetic construct
  REGION 1..26: note = Synthetic Peptide
PCPRCPEPKSCDTPPPCPRCPEPKSC

SEQ ID NO: 3506 - protein, 26 aa, synthetic construct
  REGION 1..26: note = Synthetic Peptide
CPRCPEPKSCDTPPPCPRCPEPKSCD

SEQ ID NO: 3507 - protein, 26 aa, synthetic construct
  REGION 1..26: note = Synthetic Peptide
PRCPEPKSCDTPPPCPRCPEPKSCDT

SEQ ID NO: 3508 - protein, 26 aa, synthetic construct
  REGION 1..26: note = Synthetic Peptide
RCPEPKSCDTPPPCPRCPEPKSCDTP

SEQ ID NO: 3509 - protein, 26 aa, synthetic construct
  REGION 1..26: note = Synthetic Peptide
CPEPKSCDTPPPCPRCPEPKSCDTPP

SEQ ID NO: 3510 - protein, 26 aa, synthetic construct
  REGION 1..26: note = Synthetic Peptide
PEPKSCDTPPPCPRCPEPKSCDTPPP

SEQ ID NO: 3511 - protein, 26 aa, synthetic construct
  REGION 1..26: note = Synthetic Peptide
EPKSCDTPPPCPRCPEPKSCDTPPPC

SEQ ID NO: 3512 - protein, 26 aa, synthetic construct
  REGION 1..26: note = Synthetic Peptide
PKSCDTPPPCPRCPEPKSCDTPPPCP

SEQ ID NO: 3513 - protein, 26 aa, synthetic construct
  REGION 1..26: note = Synthetic Peptide
KSCDTPPPCPRCPEPKSCDTPPPCPR

SEQ ID NO: 3514 - protein, 26 aa, synthetic construct
  REGION 1..26: note = Synthetic Peptide
SCDTPPPCPRCPEPKSCDTPPPCPRC

SEQ ID NO: 3515 - protein, 26 aa, synthetic construct
  REGION 1..26: note = Synthetic Peptide
CDTPPPCPRCPEPKSCDTPPPCPRCP

SEQ ID NO: 3516 - protein, 25 aa, synthetic construct
  REGION 1..25: note = Synthetic Peptide
ELKTPLGDTTHTCPRCPEPKSCDTP

SEQ ID NO: 3517 - protein, 25 aa, synthetic construct
  REGION 1..25: note = Synthetic Peptide
LKTPLGDTTHTCPRCPEPKSCDTPP

SEQ ID NO: 3518 - protein, 25 aa, synthetic construct
  REGION 1..25: note = Synthetic Peptide
KTPLGDTTHTCPRCPEPKSCDTPPP

SEQ ID NO: 3519 - protein, 25 aa, synthetic construct
  REGION 1..25: note = Synthetic Peptide
TPLGDTTHTCPRCPEPKSCDTPPPC

SEQ ID NO: 3520 - protein, 25 aa, synthetic construct
  REGION 1..25: note = Synthetic Peptide
PLGDTTHTCPRCPEPKSCDTPPPCP

SEQ ID NO: 3521 - protein, 25 aa, synthetic construct
  REGION 1..25: note = Synthetic Peptide
LGDTTHTCPRCPEPKSCDTPPPCPR

SEQ ID NO: 3522 - protein, 25 aa, synthetic construct
  REGION 1..25: note = Synthetic Peptide
GDTTHTCPRCPEPKSCDTPPPCPRC

SEQ ID NO: 3523 - protein, 25 aa, synthetic construct
  REGION 1..25: note = Synthetic Peptide
DTTHTCPRCPEPKSCDTPPPCPRCP

SEQ ID NO: 3524 - protein, 25 aa, synthetic construct
  REGION 1..25: note = Synthetic Peptide
TTHTCPRCPEPKSCDTPPPCPRCPE

SEQ ID NO: 3525 - protein, 25 aa, synthetic construct
  REGION 1..25: note = Synthetic Peptide
THTCPRCPEPKSCDTPPPCPRCPEP

SEQ ID NO: 3526 - protein, 25 aa, synthetic construct
  REGION 1..25: note = Synthetic Peptide
HTCPRCPEPKSCDTPPPCPRCPEPK

SEQ ID NO: 3527 - protein, 25 aa, synthetic construct
  REGION 1..25: note = Synthetic Peptide
TCPRCPEPKSCDTPPPCPRCPEPKS

SEQ ID NO: 3528 - protein, 25 aa, synthetic construct
  REGION 1..25: note = Synthetic Peptide
CPRCPEPKSCDTPPPCPRCPEPKSC

SEQ ID NO: 3529 - protein, 25 aa, synthetic construct
  REGION 1..25: note = Synthetic Peptide
PRCPEPKSCDTPPPCPRCPEPKSCD

SEQ ID NO: 3530 - protein, 25 aa, synthetic construct
  REGION 1..25: note = Synthetic Peptide
RCPEPKSCDTPPPCPRCPEPKSCDT

SEQ ID NO: 3531 - protein, 25 aa, synthetic construct
  REGION 1..25: note = Synthetic Peptide
CPEPKSCDTPPPCPRCPEPKSCDTP

SEQ ID NO: 3532 - protein, 25 aa, synthetic construct
  REGION 1..25: note = Synthetic Peptide
PEPKSCDTPPPCPRCPEPKSCDTPP

SEQ ID NO: 3533 - protein, 25 aa, synthetic construct
  REGION 1..25: note = Synthetic Peptide
EPKSCDTPPPCPRCPEPKSCDTPPP

SEQ ID NO: 3534 - protein, 25 aa, synthetic construct
  REGION 1..25: note = Synthetic Peptide
PKSCDTPPPCPRCPEPKSCDTPPPC

SEQ ID NO: 3535 - protein, 25 aa, synthetic construct
  REGION 1..25: note = Synthetic Peptide
KSCDTPPPCPRCPEPKSCDTPPPCP

SEQ ID NO: 3536 - protein, 25 aa, synthetic construct
  REGION 1..25: note = Synthetic Peptide
SCDTPPPCPRCPEPKSCDTPPPCPR

SEQ ID NO: 3537 - protein, 25 aa, synthetic construct
  REGION 1..25: note = Synthetic Peptide
CDTPPPCPRCPEPKSCDTPPPCPRC

SEQ ID NO: 3538 - protein, 25 aa, synthetic construct
  REGION 1..25: note = Synthetic Peptide
DTPPPCPRCPEPKSCDTPPPCPRCP

SEQ ID NO: 3539 - protein, 25 aa, synthetic construct
  REGION 1..25: note = Synthetic Peptide
TPPPCPRCPEPKSCDTPPPCPRCPE

SEQ ID NO: 3540 - protein, 25 aa, synthetic construct
  REGION 1..25: note = Synthetic Peptide
PPPCPRCPEPKSCDTPPPCPRCPEP

SEQ ID NO: 3541 - protein, 25 aa, synthetic construct
  REGION 1..25: note = Synthetic Peptide
PPCPRCPEPKSCDTPPPCPRCPEPK

SEQ ID NO: 3542 - protein, 25 aa, synthetic construct
  REGION 1..25: note = Synthetic Peptide
PCPRCPEPKSCDTPPPCPRCPEPKS

SEQ ID NO: 3543 - protein, 25 aa, synthetic construct
  REGION 1..25: note = Synthetic Peptide
CPRCPEPKSCDTPPPCPRCPEPKSC

SEQ ID NO: 3544 - protein, 25 aa, synthetic construct
  REGION 1..25: note = Synthetic Peptide
PRCPEPKSCDTPPPCPRCPEPKSCD

SEQ ID NO: 3545 - protein, 25 aa, synthetic construct
  REGION 1..25: note = Synthetic Peptide
RCPEPKSCDTPPPCPRCPEPKSCDT

SEQ ID NO: 3546 - protein, 25 aa, synthetic construct
  REGION 1..25: note = Synthetic Peptide
CPEPKSCDTPPPCPRCPEPKSCDTP

SEQ ID NO: 3547 - protein, 25 aa, synthetic construct
  REGION 1..25: note = Synthetic Peptide
PEPKSCDTPPPCPRCPEPKSCDTPP

SEQ ID NO: 3548 - protein, 25 aa, synthetic construct
  REGION 1..25: note = Synthetic Peptide
EPKSCDTPPPCPRCPEPKSCDTPPP

SEQ ID NO: 3549 - protein, 25 aa, synthetic construct
  REGION 1..25: note = Synthetic Peptide
PKSCDTPPPCPRCPEPKSCDTPPPC

SEQ ID NO: 3550 - protein, 25 aa, synthetic construct
  REGION 1..25: note = Synthetic Peptide
KSCDTPPPCPRCPEPKSCDTPPPCP

SEQ ID NO: 3551 - protein, 25 aa, synthetic construct
  REGION 1..25: note = Synthetic Peptide
SCDTPPPCPRCPEPKSCDTPPPCPR

SEQ ID NO: 3552 - protein, 25 aa, synthetic construct
  REGION 1..25: note = Synthetic Peptide
CDTPPPCPRCPEPKSCDTPPPCPRC

SEQ ID NO: 3553 - protein, 25 aa, synthetic construct
  REGION 1..25: note = Synthetic Peptide
DTPPPCPRCPEPKSCDTPPPCPRCP

SEQ ID NO: 3554 - protein, 24 aa, synthetic construct
  REGION 1..24: note = Synthetic Peptide
ELKTPLGDTTHTCPRCPEPKSCDT

SEQ ID NO: 3555 - protein, 24 aa, synthetic construct
  REGION 1..24: note = Synthetic Peptide
LKTPLGDTTHTCPRCPEPKSCDTP

SEQ ID NO: 3556 - protein, 24 aa, synthetic construct
  REGION 1..24: note = Synthetic Peptide
KTPLGDTTHTCPRCPEPKSCDTPP

SEQ ID NO: 3557 - protein, 24 aa, synthetic construct
  REGION 1..24: note = Synthetic Peptide
TPLGDTTHTCPRCPEPKSCDTPPP

SEQ ID NO: 3558 - protein, 24 aa, synthetic construct
  REGION 1..24: note = Synthetic Peptide
PLGDTTHTCPRCPEPKSCDTPPPC

SEQ ID NO: 3559 - protein, 24 aa, synthetic construct
  REGION 1..24: note = Synthetic Peptide
LGDTTHTCPRCPEPKSCDTPPPCP

SEQ ID NO: 3560 - protein, 24 aa, synthetic construct
  REGION 1..24: note = Synthetic Peptide
GDTTHTCPRCPEPKSCDTPPPCPR

SEQ ID NO: 3561 - protein, 24 aa, synthetic construct
  REGION 1..24: note = Synthetic Peptide
DTTHTCPRCPEPKSCDTPPPCPRC

SEQ ID NO: 3562 - protein, 24 aa, synthetic construct
  REGION 1..24: note = Synthetic Peptide
TTHTCPRCPEPKSCDTPPPCPRCP

SEQ ID NO: 3563 - protein, 24 aa, synthetic construct
  REGION 1..24: note = Synthetic Peptide
THTCPRCPEPKSCDTPPPCPRCPE

SEQ ID NO: 3564 - protein, 24 aa, synthetic construct
  REGION 1..24: note = Synthetic Peptide
HTCPRCPEPKSCDTPPPCPRCPEP

SEQ ID NO: 3565 - protein, 24 aa, synthetic construct
  REGION 1..24: note = Synthetic Peptide
TCPRCPEPKSCDTPPPCPRCPEPK

SEQ ID NO: 3566 - protein, 24 aa, synthetic construct
  REGION 1..24: note = Synthetic Peptide
CPRCPEPKSCDTPPPCPRCPEPKS

SEQ ID NO: 3567 - protein, 24 aa, synthetic construct
  REGION 1..24: note = Synthetic Peptide
PRCPEPKSCDTPPPCPRCPEPKSC

SEQ ID NO: 3568 - protein, 24 aa, synthetic construct
  REGION 1..24: note = Synthetic Peptide
RCPEPKSCDTPPPCPRCPEPKSCD

SEQ ID NO: 3569 - protein, 24 aa, synthetic construct
  REGION 1..24: note = Synthetic Peptide
CPEPKSCDTPPPCPRCPEPKSCDT

SEQ ID NO: 3570 - protein, 24 aa, synthetic construct
  REGION 1..24: note = Synthetic Peptide
PEPKSCDTPPPCPRCPEPKSCDTP

SEQ ID NO: 3571 - protein, 24 aa, synthetic construct
  REGION 1..24: note = Synthetic Peptide
EPKSCDTPPPCPRCPEPKSCDTPP

SEQ ID NO: 3572 - protein, 24 aa, synthetic construct
  REGION 1..24: note = Synthetic Peptide
PKSCDTPPPCPRCPEPKSCDTPPP

SEQ ID NO: 3573 - protein, 24 aa, synthetic construct
  REGION 1..24: note = Synthetic Peptide
KSCDTPPPCPRCPEPKSCDTPPPC

SEQ ID NO: 3574 - protein, 24 aa, synthetic construct
  REGION 1..24: note = Synthetic Peptide
SCDTPPPCPRCPEPKSCDTPPPCP

SEQ ID NO: 3575 - protein, 24 aa, synthetic construct
  REGION 1..24: note = Synthetic Peptide
CDTPPPCPRCPEPKSCDTPPPCPR

SEQ ID NO: 3576 - protein, 24 aa, synthetic construct
  REGION 1..24: note = Synthetic Peptide
DTPPPCPRCPEPKSCDTPPPCPRC

SEQ ID NO: 3577 - protein, 24 aa, synthetic construct
  REGION 1..24: note = Synthetic Peptide
TPPPCPRCPEPKSCDTPPPCPRCP

SEQ ID NO: 3578 - protein, 24 aa, synthetic construct
  REGION 1..24: note = Synthetic Peptide
PPPCPRCPEPKSCDTPPPCPRCPE

SEQ ID NO: 3579 - protein, 24 aa, synthetic construct
  REGION 1..24: note = Synthetic Peptide
PPCPRCPEPKSCDTPPPCPRCPEP

SEQ ID NO: 3580 - protein, 24 aa, synthetic construct
  REGION 1..24: note = Synthetic Peptide
PCPRCPEPKSCDTPPPCPRCPEPK

SEQ ID NO: 3581 - protein, 24 aa, synthetic construct
  REGION 1..24: note = Synthetic Peptide
CPRCPEPKSCDTPPPCPRCPEPKS

SEQ ID NO: 3582 - protein, 24 aa, synthetic construct
  REGION 1..24: note = Synthetic Peptide
PRCPEPKSCDTPPPCPRCPEPKSC

SEQ ID NO: 3583 - protein, 24 aa, synthetic construct
  REGION 1..24: note = Synthetic Peptide
RCPEPKSCDTPPPCPRCPEPKSCD

SEQ ID NO: 3584 - protein, 24 aa, synthetic construct
  REGION 1..24: note = Synthetic Peptide
CPEPKSCDTPPPCPRCPEPKSCDT

SEQ ID NO: 3585 - protein, 24 aa, synthetic construct
  REGION 1..24: note = Synthetic Peptide
PEPKSCDTPPPCPRCPEPKSCDTP

SEQ ID NO: 3586 - protein, 24 aa, synthetic construct
  REGION 1..24: note = Synthetic Peptide
EPKSCDTPPPCPRCPEPKSCDTPP

SEQ ID NO: 3587 - protein, 24 aa, synthetic construct
  REGION 1..24: note = Synthetic Peptide
PKSCDTPPPCPRCPEPKSCDTPPP

SEQ ID NO: 3588 - protein, 24 aa, synthetic construct
  REGION 1..24: note = Synthetic Peptide
KSCDTPPPCPRCPEPKSCDTPPPC

SEQ ID NO: 3589 - protein, 24 aa, synthetic construct
  REGION 1..24: note = Synthetic Peptide
SCDTPPPCPRCPEPKSCDTPPPCP

SEQ ID NO: 3590 - protein, 24 aa, synthetic construct
  REGION 1..24: note = Synthetic Peptide
CDTPPPCPRCPEPKSCDTPPPCPR

SEQ ID NO: 3591 - protein, 24 aa, synthetic construct
  REGION 1..24: note = Synthetic Peptide
DTPPPCPRCPEPKSCDTPPPCPRC

SEQ ID NO: 3592 - protein, 24 aa, synthetic construct
  REGION 1..24: note = Synthetic Peptide
TPPPCPRCPEPKSCDTPPPCPRCP

SEQ ID NO: 3593 - protein, 23 aa, synthetic construct
  REGION 1..23: note = Synthetic Peptide
ELKTPLGDTTHTCPRCPEPKSCD

SEQ ID NO: 3594 - protein, 23 aa, synthetic construct
  REGION 1..23: note = Synthetic Peptide
LKTPLGDTTHTCPRCPEPKSCDT

SEQ ID NO: 3595 - protein, 23 aa, synthetic construct
  REGION 1..23: note = Synthetic Peptide
KTPLGDTTHTCPRCPEPKSCDTP

SEQ ID NO: 3596 - protein, 23 aa, synthetic construct
  REGION 1..23: note = Synthetic Peptide
TPLGDTTHTCPRCPEPKSCDTPP

SEQ ID NO: 3597 - protein, 23 aa, synthetic construct
  REGION 1..23: note = Synthetic Peptide
PLGDTTHTCPRCPEPKSCDTPPP

SEQ ID NO: 3598 - protein, 23 aa, synthetic construct
  REGION 1..23: note = Synthetic Peptide
LGDTTHTCPRCPEPKSCDTPPPC

SEQ ID NO: 3599 - protein, 23 aa, synthetic construct
  REGION 1..23: note = Synthetic Peptide
GDTTHTCPRCPEPKSCDTPPPCP

SEQ ID NO: 3600 - protein, 23 aa, synthetic construct
  REGION 1..23: note = Synthetic Peptide
DTTHTCPRCPEPKSCDTPPPCPR

SEQ ID NO: 3601 - protein, 23 aa, synthetic construct
  REGION 1..23: note = Synthetic Peptide
TTHTCPRCPEPKSCDTPPPCPRC

SEQ ID NO: 3602 - protein, 23 aa, synthetic construct
  REGION 1..23: note = Synthetic Peptide
THTCPRCPEPKSCDTPPPCPRCP

SEQ ID NO: 3603 - protein, 23 aa, synthetic construct
  REGION 1..23: note = Synthetic Peptide
HTCPRCPEPKSCDTPPPCPRCPE

SEQ ID NO: 3604 - protein, 23 aa, synthetic construct
  REGION 1..23: note = Synthetic Peptide
TCPRCPEPKSCDTPPPCPRCPEP

SEQ ID NO: 3605 - protein, 23 aa, synthetic construct
  REGION 1..23: note = Synthetic Peptide
CPRCPEPKSCDTPPPCPRCPEPK

SEQ ID NO: 3606 - protein, 23 aa, synthetic construct
  REGION 1..23: note = Synthetic Peptide
PRCPEPKSCDTPPPCPRCPEPKS

SEQ ID NO: 3607 - protein, 23 aa, synthetic construct
  REGION 1..23: note = Synthetic Peptide
RCPEPKSCDTPPPCPRCPEPKSC

SEQ ID NO: 3608 - protein, 23 aa, synthetic construct
  REGION 1..23: note = Synthetic Peptide
CPEPKSCDTPPPCPRCPEPKSCD

SEQ ID NO: 3609 - protein, 23 aa, synthetic construct
  REGION 1..23: note = Synthetic Peptide
PEPKSCDTPPPCPRCPEPKSCDT

SEQ ID NO: 3610 - protein, 23 aa, synthetic construct
  REGION 1..23: note = Synthetic Peptide
EPKSCDTPPPCPRCPEPKSCDTP

SEQ ID NO: 3611 - protein, 23 aa, synthetic construct
  REGION 1..23: note = Synthetic Peptide
PKSCDTPPPCPRCPEPKSCDTPP

SEQ ID NO: 3612 - protein, 23 aa, synthetic construct
  REGION 1..23: note = Synthetic Peptide
KSCDTPPPCPRCPEPKSCDTPPP

SEQ ID NO: 3613 - protein, 23 aa, synthetic construct
  REGION 1..23: note = Synthetic Peptide
SCDTPPPCPRCPEPKSCDTPPPC

SEQ ID NO: 3614 - protein, 23 aa, synthetic construct
  REGION 1..23: note = Synthetic Peptide
CDTPPPCPRCPEPKSCDTPPPCP

SEQ ID NO: 3615 - protein, 23 aa, synthetic construct
  REGION 1..23: note = Synthetic Peptide
DTPPPCPRCPEPKSCDTPPPCPR

SEQ ID NO: 3616 - protein, 23 aa, synthetic construct
  REGION 1..23: note = Synthetic Peptide
TPPPCPRCPEPKSCDTPPPCPRC

SEQ ID NO: 3617 - protein, 23 aa, synthetic construct
  REGION 1..23: note = Synthetic Peptide
PPPCPRCPEPKSCDTPPPCPRCP

SEQ ID NO: 3618 - protein, 23 aa, synthetic construct
  REGION 1..23: note = Synthetic Peptide
PPCPRCPEPKSCDTPPPCPRCPE

SEQ ID NO: 3619 - protein, 23 aa, synthetic construct
  REGION 1..23: note = Synthetic Peptide
PCPRCPEPKSCDTPPPCPRCPEP

SEQ ID NO: 3620 - protein, 23 aa, synthetic construct
  REGION 1..23: note = Synthetic Peptide
CPRCPEPKSCDTPPPCPRCPEPK

SEQ ID NO: 3621 - protein, 23 aa, synthetic construct
  REGION 1..23: note = Synthetic Peptide
PRCPEPKSCDTPPPCPRCPEPKS

SEQ ID NO: 3622 - protein, 23 aa, synthetic construct
  REGION 1..23: note = Synthetic Peptide
RCPEPKSCDTPPPCPRCPEPKSC

SEQ ID NO: 3623 - protein, 23 aa, synthetic construct
  REGION 1..23: note = Synthetic Peptide
CPEPKSCDTPPPCPRCPEPKSCD

SEQ ID NO: 3624 - protein, 23 aa, synthetic construct
  REGION 1..23: note = Synthetic Peptide
PEPKSCDTPPPCPRCPEPKSCDT

SEQ ID NO: 3625 - protein, 23 aa, synthetic construct
  REGION 1..23: note = Synthetic Peptide
EPKSCDTPPPCPRCPEPKSCDTP

SEQ ID NO: 3626 - protein, 23 aa, synthetic construct
  REGION 1..23: note = Synthetic Peptide
PKSCDTPPPCPRCPEPKSCDTPP

SEQ ID NO: 3627 - protein, 23 aa, synthetic construct
  REGION 1..23: note = Synthetic Peptide
KSCDTPPPCPRCPEPKSCDTPPP

SEQ ID NO: 3628 - protein, 23 aa, synthetic construct
  REGION 1..23: note = Synthetic Peptide
SCDTPPPCPRCPEPKSCDTPPPC

SEQ ID NO: 3629 - protein, 23 aa, synthetic construct
  REGION 1..23: note = Synthetic Peptide
CDTPPPCPRCPEPKSCDTPPPCP

SEQ ID NO: 3630 - protein, 23 aa, synthetic construct
  REGION 1..23: note = Synthetic Peptide
DTPPPCPRCPEPKSCDTPPPCPR

SEQ ID NO: 3631 - protein, 23 aa, synthetic construct
  REGION 1..23: note = Synthetic Peptide
TPPPCPRCPEPKSCDTPPPCPRC

SEQ ID NO: 3632 - protein, 23 aa, synthetic construct
  REGION 1..23: note = Synthetic Peptide
PPPCPRCPEPKSCDTPPPCPRCP

SEQ ID NO: 3633 - protein, 22 aa, synthetic construct
  REGION 1..22: note = Synthetic Peptide
ELKTPLGDTTHTCPRCPEPKSC

SEQ ID NO: 3634 - protein, 22 aa, synthetic construct
  REGION 1..22: note = Synthetic Peptide
LKTPLGDTTHTCPRCPEPKSCD

SEQ ID NO: 3635 - protein, 22 aa, synthetic construct
  REGION 1..22: note = Synthetic Peptide
KTPLGDTTHTCPRCPEPKSCDT

SEQ ID NO: 3636 - protein, 22 aa, synthetic construct
  REGION 1..22: note = Synthetic Peptide
TPLGDTTHTCPRCPEPKSCDTP

SEQ ID NO: 3637 - protein, 22 aa, synthetic construct
  REGION 1..22: note = Synthetic Peptide
PLGDTTHTCPRCPEPKSCDTPP

SEQ ID NO: 3638 - protein, 22 aa, synthetic construct
  REGION 1..22: note = Synthetic Peptide
LGDTTHTCPRCPEPKSCDTPPP

SEQ ID NO: 3639 - protein, 22 aa, synthetic construct
  REGION 1..22: note = Synthetic Peptide
GDTTHTCPRCPEPKSCDTPPPC

SEQ ID NO: 3640 - protein, 22 aa, synthetic construct
  REGION 1..22: note = Synthetic Peptide
DTTHTCPRCPEPKSCDTPPPCP

SEQ ID NO: 3641 - protein, 22 aa, synthetic construct
  REGION 1..22: note = Synthetic Peptide
TTHTCPRCPEPKSCDTPPPCPR

SEQ ID NO: 3642 - protein, 22 aa, synthetic construct
  REGION 1..22: note = Synthetic Peptide
THTCPRCPEPKSCDTPPPCPRC

SEQ ID NO: 3643 - protein, 22 aa, synthetic construct
  REGION 1..22: note = Synthetic Peptide
HTCPRCPEPKSCDTPPPCPRCP

SEQ ID NO: 3644 - protein, 22 aa, synthetic construct
  REGION 1..22: note = Synthetic Peptide
TCPRCPEPKSCDTPPPCPRCPE

SEQ ID NO: 3645 - protein, 22 aa, synthetic construct
  REGION 1..22: note = Synthetic Peptide
CPRCPEPKSCDTPPPCPRCPEP

SEQ ID NO: 3646 - protein, 22 aa, synthetic construct
  REGION 1..22: note = Synthetic Peptide
PRCPEPKSCDTPPPCPRCPEPK

SEQ ID NO: 3647 - protein, 22 aa, synthetic construct
  REGION 1..22: note = Synthetic Peptide
RCPEPKSCDTPPPCPRCPEPKS

SEQ ID NO: 3648 - protein, 22 aa, synthetic construct
  REGION 1..22: note = Synthetic Peptide
CPEPKSCDTPPPCPRCPEPKSC

SEQ ID NO: 3649 - protein, 22 aa, synthetic construct
  REGION 1..22: note = Synthetic Peptide
PEPKSCDTPPPCPRCPEPKSCD

SEQ ID NO: 3650 - protein, 22 aa, synthetic construct
  REGION 1..22: note = Synthetic Peptide
EPKSCDTPPPCPRCPEPKSCDT

SEQ ID NO: 3651 - protein, 22 aa, synthetic construct
  REGION 1..22: note = Synthetic Peptide
PKSCDTPPPCPRCPEPKSCDTP

SEQ ID NO: 3652 - protein, 22 aa, synthetic construct
  REGION 1..22: note = Synthetic Peptide
KSCDTPPPCPRCPEPKSCDTPP

SEQ ID NO: 3653 - protein, 22 aa, synthetic construct
  REGION 1..22: note = Synthetic Peptide
SCDTPPPCPRCPEPKSCDTPPP

SEQ ID NO: 3654 - protein, 22 aa, synthetic construct
  REGION 1..22: note = Synthetic Peptide
CDTPPPCPRCPEPKSCDTPPPC

SEQ ID NO: 3655 - protein, 22 aa, synthetic construct
  REGION 1..22: note = Synthetic Peptide
DTPPPCPRCPEPKSCDTPPPCP

SEQ ID NO: 3656 - protein, 22 aa, synthetic construct
  REGION 1..22: note = Synthetic Peptide
TPPPCPRCPEPKSCDTPPPCPR

SEQ ID NO: 3657 - protein, 22 aa, synthetic construct
  REGION 1..22: note = Synthetic Peptide
PPPCPRCPEPKSCDTPPPCPRC

SEQ ID NO: 3658 - protein, 22 aa, synthetic construct
  REGION 1..22: note = Synthetic Peptide
PPCPRCPEPKSCDTPPPCPRCP

SEQ ID NO: 3659 - protein, 22 aa, synthetic construct
  REGION 1..22: note = Synthetic Peptide
PCPRCPEPKSCDTPPPCPRCPE

SEQ ID NO: 3660 - protein, 22 aa, synthetic construct
  REGION 1..22: note = Synthetic Peptide
CPRCPEPKSCDTPPPCPRCPEP

SEQ ID NO: 3661 - protein, 22 aa, synthetic construct
  REGION 1..22: note = Synthetic Peptide
PRCPEPKSCDTPPPCPRCPEPK

SEQ ID NO: 3662 - protein, 22 aa, synthetic construct
  REGION 1..22: note = Synthetic Peptide
RCPEPKSCDTPPPCPRCPEPKS

SEQ ID NO: 3663 - protein, 22 aa, synthetic construct
  REGION 1..22: note = Synthetic Peptide
CPEPKSCDTPPPCPRCPEPKSC

SEQ ID NO: 3664 - protein, 22 aa, synthetic construct
  REGION 1..22: note = Synthetic Peptide
PEPKSCDTPPPCPRCPEPKSCD

SEQ ID NO: 3665 - protein, 22 aa, synthetic construct
  REGION 1..22: note = Synthetic Peptide
EPKSCDTPPPCPRCPEPKSCDT

SEQ ID NO: 3666 - protein, 22 aa, synthetic construct
  REGION 1..22: note = Synthetic Peptide
PKSCDTPPPCPRCPEPKSCDTP

SEQ ID NO: 3667 - protein, 22 aa, synthetic construct
  REGION 1..22: note = Synthetic Peptide
KSCDTPPPCPRCPEPKSCDTPP

SEQ ID NO: 3668 - protein, 22 aa, synthetic construct
  REGION 1..22: note = Synthetic Peptide
SCDTPPPCPRCPEPKSCDTPPP

SEQ ID NO: 3669 - protein, 22 aa, synthetic construct
  REGION 1..22: note = Synthetic Peptide
CDTPPPCPRCPEPKSCDTPPPC

SEQ ID NO: 3670 - protein, 22 aa, synthetic construct
  REGION 1..22: note = Synthetic Peptide
DTPPPCPRCPEPKSCDTPPPCP

SEQ ID NO: 3671 - protein, 22 aa, synthetic construct
  REGION 1..22: note = Synthetic Peptide
TPPPCPRCPEPKSCDTPPPCPR

SEQ ID NO: 3672 - protein, 22 aa, synthetic construct
  REGION 1..22: note = Synthetic Peptide
PPPCPRCPEPKSCDTPPPCPRC

SEQ ID NO: 3673 - protein, 22 aa, synthetic construct
  REGION 1..22: note = Synthetic Peptide
PPCPRCPEPKSCDTPPPCPRCP

SEQ ID NO: 3674 - protein, 21 aa, synthetic construct
  REGION 1..21: note = Synthetic Peptide
ELKTPLGDTTHTCPRCPEPKS

SEQ ID NO: 3675 - protein, 21 aa, synthetic construct
  REGION 1..21: note = Synthetic Peptide
LKTPLGDTTHTCPRCPEPKSC

SEQ ID NO: 3676 - protein, 21 aa, synthetic construct
  REGION 1..21: note = Synthetic Peptide
KTPLGDTTHTCPRCPEPKSCD

SEQ ID NO: 3677 - protein, 21 aa, synthetic construct
  REGION 1..21: note = Synthetic Peptide
TPLGDTTHTCPRCPEPKSCDT

SEQ ID NO: 3678 - protein, 21 aa, synthetic construct
  REGION 1..21: note = Synthetic Peptide
PLGDTTHTCPRCPEPKSCDTP

SEQ ID NO: 3679 - protein, 21 aa, synthetic construct
  REGION 1..21: note = Synthetic Peptide
LGDTTHTCPRCPEPKSCDTPP

SEQ ID NO: 3680 - protein, 21 aa, synthetic construct
  REGION 1..21: note = Synthetic Peptide
GDTTHTCPRCPEPKSCDTPPP

SEQ ID NO: 3681 - protein, 21 aa, synthetic construct
  REGION 1..21: note = Synthetic Peptide
DTTHTCPRCPEPKSCDTPPPC

SEQ ID NO: 3682 - protein, 21 aa, synthetic construct
  REGION 1..21: note = Synthetic Peptide
TTHTCPRCPEPKSCDTPPPCP

SEQ ID NO: 3683 - protein, 21 aa, synthetic construct
  REGION 1..21: note = Synthetic Peptide
THTCPRCPEPKSCDTPPPCPR

SEQ ID NO: 3684 - protein, 21 aa, synthetic construct
  REGION 1..21: note = Synthetic Peptide
HTCPRCPEPKSCDTPPPCPRC

SEQ ID NO: 3685 - protein, 21 aa, synthetic construct
  REGION 1..21: note = Synthetic Peptide
TCPRCPEPKSCDTPPPCPRCP

SEQ ID NO: 3686 - protein, 21 aa, synthetic construct
  REGION 1..21: note = Synthetic Peptide
CPRCPEPKSCDTPPPCPRCPE

SEQ ID NO: 3687 - protein, 21 aa, synthetic construct
  REGION 1..21: note = Synthetic Peptide
PRCPEPKSCDTPPPCPRCPEP

SEQ ID NO: 3688 - protein, 21 aa, synthetic construct
  REGION 1..21: note = Synthetic Peptide
RCPEPKSCDTPPPCPRCPEPK

SEQ ID NO: 3689 - protein, 21 aa, synthetic construct
  REGION 1..21: note = Synthetic Peptide
CPEPKSCDTPPPCPRCPEPKS

SEQ ID NO: 3690 - protein, 21 aa, synthetic construct
  REGION 1..21: note = Synthetic Peptide
PEPKSCDTPPPCPRCPEPKSC

SEQ ID NO: 3691 - protein, 21 aa, synthetic construct
  REGION 1..21: note = Synthetic Peptide
EPKSCDTPPPCPRCPEPKSCD

SEQ ID NO: 3692 - protein, 21 aa, synthetic construct
  REGION 1..21: note = Synthetic Peptide
PKSCDTPPPCPRCPEPKSCDT

SEQ ID NO: 3693 - protein, 21 aa, synthetic construct
  REGION 1..21: note = Synthetic Peptide
KSCDTPPPCPRCPEPKSCDTP

SEQ ID NO: 3694 - protein, 21 aa, synthetic construct
  REGION 1..21: note = Synthetic Peptide
SCDTPPPCPRCPEPKSCDTPP

SEQ ID NO: 3695 - protein, 21 aa, synthetic construct
  REGION 1..21: note = Synthetic Peptide
CDTPPPCPRCPEPKSCDTPPP

SEQ ID NO: 3696 - protein, 21 aa, synthetic construct
  REGION 1..21: note = Synthetic Peptide
DTPPPCPRCPEPKSCDTPPPC

SEQ ID NO: 3697 - protein, 21 aa, synthetic construct
  REGION 1..21: note = Synthetic Peptide
TPPPCPRCPEPKSCDTPPPCP

SEQ ID NO: 3698 - protein, 21 aa, synthetic construct
  REGION 1..21: note = Synthetic Peptide
PPPCPRCPEPKSCDTPPPCPR

SEQ ID NO: 3699 - protein, 21 aa, synthetic construct
  REGION 1..21: note = Synthetic Peptide
PPCPRCPEPKSCDTPPPCPRC

SEQ ID NO: 3700 - protein, 21 aa, synthetic construct
  REGION 1..21: note = Synthetic Peptide
PCPRCPEPKSCDTPPPCPRCP

SEQ ID NO: 3701 - protein, 21 aa, synthetic construct
  REGION 1..21: note = Synthetic Peptide
CPRCPEPKSCDTPPPCPRCPE

SEQ ID NO: 3702 - protein, 21 aa, synthetic construct
  REGION 1..21: note = Synthetic Peptide
PRCPEPKSCDTPPPCPRCPEP

SEQ ID NO: 3703 - protein, 21 aa, synthetic construct
  REGION 1..21: note = Synthetic Peptide
RCPEPKSCDTPPPCPRCPEPK

SEQ ID NO: 3704 - protein, 21 aa, synthetic construct
  REGION 1..21: note = Synthetic Peptide
CPEPKSCDTPPPCPRCPEPKS

SEQ ID NO: 3705 - protein, 21 aa, synthetic construct
  REGION 1..21: note = Synthetic Peptide
PEPKSCDTPPPCPRCPEPKSC

SEQ ID NO: 3706 - protein, 21 aa, synthetic construct
  REGION 1..21: note = Synthetic Peptide
EPKSCDTPPPCPRCPEPKSCD

SEQ ID NO: 3707 - protein, 21 aa, synthetic construct
  REGION 1..21: note = Synthetic Peptide
PKSCDTPPPCPRCPEPKSCDT

SEQ ID NO: 3708 - protein, 21 aa, synthetic construct
  REGION 1..21: note = Synthetic Peptide
KSCDTPPPCPRCPEPKSCDTP

SEQ ID NO: 3709 - protein, 21 aa, synthetic construct
  REGION 1..21: note = Synthetic Peptide
SCDTPPPCPRCPEPKSCDTPP

SEQ ID NO: 3710 - protein, 21 aa, synthetic construct
  REGION 1..21: note = Synthetic Peptide
CDTPPPCPRCPEPKSCDTPPP

SEQ ID NO: 3711 - protein, 21 aa, synthetic construct
  REGION 1..21: note = Synthetic Peptide
DTPPPCPRCPEPKSCDTPPPC

SEQ ID NO: 3712 - protein, 21 aa, synthetic construct
  REGION 1..21: note = Synthetic Peptide
TPPPCPRCPEPKSCDTPPPCP

SEQ ID NO: 3713 - protein, 21 aa, synthetic construct
  REGION 1..21: note = Synthetic Peptide
PPPCPRCPEPKSCDTPPPCPR

SEQ ID NO: 3714 - protein, 21 aa, synthetic construct
  REGION 1..21: note = Synthetic Peptide
PPCPRCPEPKSCDTPPPCPRC

SEQ ID NO: 3715 - protein, 21 aa, synthetic construct
  REGION 1..21: note = Synthetic Peptide
PCPRCPEPKSCDTPPPCPRCP

SEQ ID NO: 3716 - protein, 20 aa, synthetic construct
  REGION 1..20: note = Synthetic Peptide
ELKTPLGDTTHTCPRCPEPK

SEQ ID NO: 3717 - protein, 20 aa, synthetic construct
  REGION 1..20: note = Synthetic Peptide
LKTPLGDTTHTCPRCPEPKS

SEQ ID NO: 3718 - protein, 20 aa, synthetic construct
  REGION 1..20: note = Synthetic Peptide
KTPLGDTTHTCPRCPEPKSC

SEQ ID NO: 3719 - protein, 20 aa, synthetic construct
  REGION 1..20: note = Synthetic Peptide
TPLGDTTHTCPRCPEPKSCD

SEQ ID NO: 3720 - protein, 20 aa, synthetic construct
  REGION 1..20: note = Synthetic Peptide
PLGDTTHTCPRCPEPKSCDT

SEQ ID NO: 3721 - protein, 20 aa, synthetic construct
  REGION 1..20: note = Synthetic Peptide
LGDTTHTCPRCPEPKSCDTP

SEQ ID NO: 3722 - protein, 20 aa, synthetic construct
  REGION 1..20: note = Synthetic Peptide
GDTTHTCPRCPEPKSCDTPP

SEQ ID NO: 3723 - protein, 20 aa, synthetic construct
  REGION 1..20: note = Synthetic Peptide
DTTHTCPRCPEPKSCDTPPP

SEQ ID NO: 3724 - protein, 20 aa, synthetic construct
  REGION 1..20: note = Synthetic Peptide
TTHTCPRCPEPKSCDTPPPC

SEQ ID NO: 3725 - protein, 20 aa, synthetic construct
  REGION 1..20: note = Synthetic Peptide
THTCPRCPEPKSCDTPPPCP

SEQ ID NO: 3726 - protein, 20 aa, synthetic construct
  REGION 1..20: note = Synthetic Peptide
HTCPRCPEPKSCDTPPPCPR

SEQ ID NO: 3727 - protein, 20 aa, synthetic construct
  REGION 1..20: note = Synthetic Peptide
TCPRCPEPKSCDTPPPCPRC

SEQ ID NO: 3728 - protein, 20 aa, synthetic construct
  REGION 1..20: note = Synthetic Peptide
CPRCPEPKSCDTPPPCPRCP

SEQ ID NO: 3729 - protein, 20 aa, synthetic construct
  REGION 1..20: note = Synthetic Peptide
PRCPEPKSCDTPPPCPRCPE

SEQ ID NO: 3730 - protein, 20 aa, synthetic construct
  REGION 1..20: note = Synthetic Peptide
RCPEPKSCDTPPPCPRCPEP

SEQ ID NO: 3731 - protein, 20 aa, synthetic construct
  REGION 1..20: note = Synthetic Peptide
CPEPKSCDTPPPCPRCPEPK

SEQ ID NO: 3732 - protein, 20 aa, synthetic construct
  REGION 1..20: note = Synthetic Peptide
PEPKSCDTPPPCPRCPEPKS

SEQ ID NO: 3733 - protein, 20 aa, synthetic construct
  REGION 1..20: note = Synthetic Peptide
EPKSCDTPPPCPRCPEPKSC

SEQ ID NO: 3734 - protein, 20 aa, synthetic construct
  REGION 1..20: note = Synthetic Peptide
PKSCDTPPPCPRCPEPKSCD

SEQ ID NO: 3735 - protein, 20 aa, synthetic construct
  REGION 1..20: note = Synthetic Peptide
KSCDTPPPCPRCPEPKSCDT

SEQ ID NO: 3736 - protein, 20 aa, synthetic construct
  REGION 1..20: note = Synthetic Peptide
SCDTPPPCPRCPEPKSCDTP

SEQ ID NO: 3737 - protein, 20 aa, synthetic construct
  REGION 1..20: note = Synthetic Peptide
CDTPPPCPRCPEPKSCDTPP

SEQ ID NO: 3738 - protein, 20 aa, synthetic construct
  REGION 1..20: note = Synthetic Peptide
DTPPPCPRCPEPKSCDTPPP

SEQ ID NO: 3739 - protein, 20 aa, synthetic construct
  REGION 1..20: note = Synthetic Peptide
TPPPCPRCPEPKSCDTPPPC

SEQ ID NO: 3740 - protein, 20 aa, synthetic construct
  REGION 1..20: note = Synthetic Peptide
PPPCPRCPEPKSCDTPPPCP

SEQ ID NO: 3741 - protein, 20 aa, synthetic construct
  REGION 1..20: note = Synthetic Peptide
PPCPRCPEPKSCDTPPPCPR

SEQ ID NO: 3742 - protein, 20 aa, synthetic construct
  REGION 1..20: note = Synthetic Peptide
PCPRCPEPKSCDTPPPCPRC

SEQ ID NO: 3743 - protein, 20 aa, synthetic construct
  REGION 1..20: note = Synthetic Peptide
CPRCPEPKSCDTPPPCPRCP

SEQ ID NO: 3744 - protein, 20 aa, synthetic construct
  REGION 1..20: note = Synthetic Peptide
PRCPEPKSCDTPPPCPRCPE

SEQ ID NO: 3745 - protein, 20 aa, synthetic construct
  REGION 1..20: note = Synthetic Peptide
RCPEPKSCDTPPPCPRCPEP

SEQ ID NO: 3746 - protein, 20 aa, synthetic construct
  REGION 1..20: note = Synthetic Peptide
CPEPKSCDTPPPCPRCPEPK

SEQ ID NO: 3747 - protein, 20 aa, synthetic construct
  REGION 1..20: note = Synthetic Peptide
PEPKSCDTPPPCPRCPEPKS

SEQ ID NO: 3748 - protein, 20 aa, synthetic construct
  REGION 1..20: note = Synthetic Peptide
EPKSCDTPPPCPRCPEPKSC

SEQ ID NO: 3749 - protein, 20 aa, synthetic construct
  REGION 1..20: note = Synthetic Peptide
PKSCDTPPPCPRCPEPKSCD

SEQ ID NO: 3750 - protein, 20 aa, synthetic construct
  REGION 1..20: note = Synthetic Peptide
KSCDTPPPCPRCPEPKSCDT

SEQ ID NO: 3751 - protein, 20 aa, synthetic construct
  REGION 1..20: note = Synthetic Peptide
SCDTPPPCPRCPEPKSCDTP

SEQ ID NO: 3752 - protein, 20 aa, synthetic construct
  REGION 1..20: note = Synthetic Peptide
CDTPPPCPRCPEPKSCDTPP

SEQ ID NO: 3753 - protein, 20 aa, synthetic construct
  REGION 1..20: note = Synthetic Peptide
DTPPPCPRCPEPKSCDTPPP

SEQ ID NO: 3754 - protein, 20 aa, synthetic construct
  REGION 1..20: note = Synthetic Peptide
TPPPCPRCPEPKSCDTPPPC

SEQ ID NO: 3755 - protein, 20 aa, synthetic construct
  REGION 1..20: note = Synthetic Peptide
PPPCPRCPEPKSCDTPPPCP

SEQ ID NO: 3756 - protein, 20 aa, synthetic construct
  REGION 1..20: note = Synthetic Peptide
PPCPRCPEPKSCDTPPPCPR

SEQ ID NO: 3757 - protein, 20 aa, synthetic construct
  REGION 1..20: note = Synthetic Peptide
PCPRCPEPKSCDTPPPCPRC

SEQ ID NO: 3758 - protein, 20 aa, synthetic construct
  REGION 1..20: note = Synthetic Peptide
CPRCPEPKSCDTPPPCPRCP

SEQ ID NO: 3759 - protein, 19 aa, synthetic construct
  REGION 1..19: note = Synthetic Peptide
ELKTPLGDTTHTCPRCPEP

SEQ ID NO: 3760 - protein, 19 aa, synthetic construct
  REGION 1..19: note = Synthetic Peptide
LKTPLGDTTHTCPRCPEPK

SEQ ID NO: 3761 - protein, 19 aa, synthetic construct
  REGION 1..19: note = Synthetic Peptide
KTPLGDTTHTCPRCPEPKS

SEQ ID NO: 3762 - protein, 19 aa, synthetic construct
  REGION 1..19: note = Synthetic Peptide
TPLGDTTHTCPRCPEPKSC

SEQ ID NO: 3763 - protein, 19 aa, synthetic construct
  REGION 1..19: note = Synthetic Peptide
PLGDTTHTCPRCPEPKSCD

SEQ ID NO: 3764 - protein, 19 aa, synthetic construct
  REGION 1..19: note = Synthetic Peptide
LGDTTHTCPRCPEPKSCDT

SEQ ID NO: 3765 - protein, 19 aa, synthetic construct
  REGION 1..19: note = Synthetic Peptide
GDTTHTCPRCPEPKSCDTP

SEQ ID NO: 3766 - protein, 19 aa, synthetic construct
  REGION 1..19: note = Synthetic Peptide
DTTHTCPRCPEPKSCDTPP

SEQ ID NO: 3767 - protein, 19 aa, synthetic construct
  REGION 1..19: note = Synthetic Peptide
TTHTCPRCPEPKSCDTPPP

SEQ ID NO: 3768 - protein, 19 aa, synthetic construct
  REGION 1..19: note = Synthetic Peptide
THTCPRCPEPKSCDTPPPC

SEQ ID NO: 3769 - protein, 19 aa, synthetic construct
  REGION 1..19: note = Synthetic Peptide
HTCPRCPEPKSCDTPPPCP

SEQ ID NO: 3770 - protein, 19 aa, synthetic construct
  REGION 1..19: note = Synthetic Peptide
TCPRCPEPKSCDTPPPCPR

SEQ ID NO: 3771 - protein, 19 aa, synthetic construct
  REGION 1..19: note = Synthetic Peptide
CPRCPEPKSCDTPPPCPRC

SEQ ID NO: 3772 - protein, 19 aa, synthetic construct
  REGION 1..19: note = Synthetic Peptide
PRCPEPKSCDTPPPCPRCP

SEQ ID NO: 3773 - protein, 19 aa, synthetic construct
  REGION 1..19: note = Synthetic Peptide
RCPEPKSCDTPPPCPRCPE

SEQ ID NO: 3774 - protein, 19 aa, synthetic construct
  REGION 1..19: note = Synthetic Peptide
CPEPKSCDTPPPCPRCPEP

SEQ ID NO: 3775 - protein, 19 aa, synthetic construct
  REGION 1..19: note = Synthetic Peptide
PEPKSCDTPPPCPRCPEPK

SEQ ID NO: 3776 - protein, 19 aa, synthetic construct
  REGION 1..19: note = Synthetic Peptide
EPKSCDTPPPCPRCPEPKS

SEQ ID NO: 3777 - protein, 19 aa, synthetic construct
  REGION 1..19: note = Synthetic Peptide
PKSCDTPPPCPRCPEPKSC

SEQ ID NO: 3778 - protein, 19 aa, synthetic construct
  REGION 1..19: note = Synthetic Peptide
KSCDTPPPCPRCPEPKSCD

SEQ ID NO: 3779 - protein, 19 aa, synthetic construct
  REGION 1..19: note = Synthetic Peptide
SCDTPPPCPRCPEPKSCDT

SEQ ID NO: 3780 - protein, 19 aa, synthetic construct
  REGION 1..19: note = Synthetic Peptide
CDTPPPCPRCPEPKSCDTP

SEQ ID NO: 3781 - protein, 19 aa, synthetic construct
  REGION 1..19: note = Synthetic Peptide
DTPPPCPRCPEPKSCDTPP

SEQ ID NO: 3782 - protein, 19 aa, synthetic construct
  REGION 1..19: note = Synthetic Peptide
TPPPCPRCPEPKSCDTPPP

SEQ ID NO: 3783 - protein, 19 aa, synthetic construct
  REGION 1..19: note = Synthetic Peptide
PPPCPRCPEPKSCDTPPPC

SEQ ID NO: 3784 - protein, 19 aa, synthetic construct
  REGION 1..19: note = Synthetic Peptide
PPCPRCPEPKSCDTPPPCP

SEQ ID NO: 3785 - protein, 19 aa, synthetic construct
  REGION 1..19: note = Synthetic Peptide
PCPRCPEPKSCDTPPPCPR

SEQ ID NO: 3786 - protein, 19 aa, synthetic construct
  REGION 1..19: note = Synthetic Peptide
CPRCPEPKSCDTPPPCPRC

SEQ ID NO: 3787 - protein, 19 aa, synthetic construct
  REGION 1..19: note = Synthetic Peptide
PRCPEPKSCDTPPPCPRCP

SEQ ID NO: 3788 - protein, 19 aa, synthetic construct
  REGION 1..19: note = Synthetic Peptide
RCPEPKSCDTPPPCPRCPE

SEQ ID NO: 3789 - protein, 19 aa, synthetic construct
  REGION 1..19: note = Synthetic Peptide
CPEPKSCDTPPPCPRCPEP

SEQ ID NO: 3790 - protein, 19 aa, synthetic construct
  REGION 1..19: note = Synthetic Peptide
PEPKSCDTPPPCPRCPEPK

SEQ ID NO: 3791 - protein, 19 aa, synthetic construct
  REGION 1..19: note = Synthetic Peptide
EPKSCDTPPPCPRCPEPKS

SEQ ID NO: 3792 - protein, 19 aa, synthetic construct
  REGION 1..19: note = Synthetic Peptide
PKSCDTPPPCPRCPEPKSC

SEQ ID NO: 3793 - protein, 19 aa, synthetic construct
  REGION 1..19: note = Synthetic Peptide
KSCDTPPPCPRCPEPKSCD

SEQ ID NO: 3794 - protein, 19 aa, synthetic construct
  REGION 1..19: note = Synthetic Peptide
SCDTPPPCPRCPEPKSCDT

SEQ ID NO: 3795 - protein, 19 aa, synthetic construct
  REGION 1..19: note = Synthetic Peptide
CDTPPPCPRCPEPKSCDTP

SEQ ID NO: 3796 - protein, 19 aa, synthetic construct
  REGION 1..19: note = Synthetic Peptide
DTPPPCPRCPEPKSCDTPP

SEQ ID NO: 3797 - protein, 19 aa, synthetic construct
  REGION 1..19: note = Synthetic Peptide
TPPPCPRCPEPKSCDTPPP

SEQ ID NO: 3798 - protein, 19 aa, synthetic construct
  REGION 1..19: note = Synthetic Peptide
PPPCPRCPEPKSCDTPPPC

SEQ ID NO: 3799 - protein, 19 aa, synthetic construct
  REGION 1..19: note = Synthetic Peptide
PPCPRCPEPKSCDTPPPCP

SEQ ID NO: 3800 - protein, 19 aa, synthetic construct
  REGION 1..19: note = Synthetic Peptide
PCPRCPEPKSCDTPPPCPR

SEQ ID NO: 3801 - protein, 19 aa, synthetic construct
  REGION 1..19: note = Synthetic Peptide
CPRCPEPKSCDTPPPCPRC

SEQ ID NO: 3802 - protein, 19 aa, synthetic construct
  REGION 1..19: note = Synthetic Peptide
PRCPEPKSCDTPPPCPRCP

SEQ ID NO: 3803 - protein, 18 aa, synthetic construct
  REGION 1..18: note = Synthetic Peptide
ELKTPLGDTTHTCPRCPE

SEQ ID NO: 3804 - protein, 18 aa, synthetic construct
  REGION 1..18: note = Synthetic Peptide
LKTPLGDTTHTCPRCPEP

SEQ ID NO: 3805 - protein, 18 aa, synthetic construct
  REGION 1..18: note = Synthetic Peptide
KTPLGDTTHTCPRCPEPK

SEQ ID NO: 3806 - protein, 18 aa, synthetic construct
  REGION 1..18: note = Synthetic Peptide
TPLGDTTHTCPRCPEPKS

SEQ ID NO: 3807 - protein, 18 aa, synthetic construct
  REGION 1..18: note = Synthetic Peptide
PLGDTTHTCPRCPEPKSC

SEQ ID NO: 3808 - protein, 18 aa, synthetic construct
  REGION 1..18: note = Synthetic Peptide
LGDTTHTCPRCPEPKSCD

SEQ ID NO: 3809 - protein, 18 aa, synthetic construct
  REGION 1..18: note = Synthetic Peptide
GDTTHTCPRCPEPKSCDT

SEQ ID NO: 3810 - protein, 18 aa, synthetic construct
  REGION 1..18: note = Synthetic Peptide
DTTHTCPRCPEPKSCDTP

SEQ ID NO: 3811 - protein, 18 aa, synthetic construct
  REGION 1..18: note = Synthetic Peptide
TTHTCPRCPEPKSCDTPP

SEQ ID NO: 3812 - protein, 18 aa, synthetic construct
  REGION 1..18: note = Synthetic Peptide
THTCPRCPEPKSCDTPPP

SEQ ID NO: 3813 - protein, 18 aa, synthetic construct
  REGION 1..18: note = Synthetic Peptide
HTCPRCPEPKSCDTPPPC

SEQ ID NO: 3814 - protein, 18 aa, synthetic construct
  REGION 1..18: note = Synthetic Peptide
TCPRCPEPKSCDTPPPCP

SEQ ID NO: 3815 - protein, 18 aa, synthetic construct
  REGION 1..18: note = Synthetic Peptide
CPRCPEPKSCDTPPPCPR

SEQ ID NO: 3816 - protein, 18 aa, synthetic construct
  REGION 1..18: note = Synthetic Peptide
PRCPEPKSCDTPPPCPRC

SEQ ID NO: 3817 - protein, 18 aa, synthetic construct
  REGION 1..18: note = Synthetic Peptide
RCPEPKSCDTPPPCPRCP

SEQ ID NO: 3818 - protein, 18 aa, synthetic construct
  REGION 1..18: note = Synthetic Peptide
CPEPKSCDTPPPCPRCPE

SEQ ID NO: 3819 - protein, 18 aa, synthetic construct
  REGION 1..18: note = Synthetic Peptide
PEPKSCDTPPPCPRCPEP

SEQ ID NO: 3820 - protein, 18 aa, synthetic construct
  REGION 1..18: note = Synthetic Peptide
EPKSCDTPPPCPRCPEPK

SEQ ID NO: 3821 - protein, 18 aa, synthetic construct
  REGION 1..18: note = Synthetic Peptide
PKSCDTPPPCPRCPEPKS

SEQ ID NO: 3822 - protein, 18 aa, synthetic construct
  REGION 1..18: note = Synthetic Peptide
KSCDTPPPCPRCPEPKSC

SEQ ID NO: 3823 - protein, 18 aa, synthetic construct
  REGION 1..18: note = Synthetic Peptide
SCDTPPPCPRCPEPKSCD

SEQ ID NO: 3824 - protein, 18 aa, synthetic construct
  REGION 1..18: note = Synthetic Peptide
CDTPPPCPRCPEPKSCDT

SEQ ID NO: 3825 - protein, 18 aa, synthetic construct
  REGION 1..18: note = Synthetic Peptide
DTPPPCPRCPEPKSCDTP

SEQ ID NO: 3826 - protein, 18 aa, synthetic construct
  REGION 1..18: note = Synthetic Peptide
TPPPCPRCPEPKSCDTPP

SEQ ID NO: 3827 - protein, 18 aa, synthetic construct
  REGION 1..18: note = Synthetic Peptide
PPPCPRCPEPKSCDTPPP

SEQ ID NO: 3828 - protein, 18 aa, synthetic construct
  REGION 1..18: note = Synthetic Peptide
PPCPRCPEPKSCDTPPPC

SEQ ID NO: 3829 - protein, 18 aa, synthetic construct
  REGION 1..18: note = Synthetic Peptide
PCPRCPEPKSCDTPPPCP

SEQ ID NO: 3830 - protein, 18 aa, synthetic construct
  REGION 1..18: note = Synthetic Peptide
CPRCPEPKSCDTPPPCPR

SEQ ID NO: 3831 - protein, 18 aa, synthetic construct
  REGION 1..18: note = Synthetic Peptide
PRCPEPKSCDTPPPCPRC

SEQ ID NO: 3832 - protein, 18 aa, synthetic construct
  REGION 1..18: note = Synthetic Peptide
RCPEPKSCDTPPPCPRCP

SEQ ID NO: 3833 - protein, 18 aa, synthetic construct
  REGION 1..18: note = Synthetic Peptide
CPEPKSCDTPPPCPRCPE

SEQ ID NO: 3834 - protein, 18 aa, synthetic construct
  REGION 1..18: note = Synthetic Peptide
PEPKSCDTPPPCPRCPEP

SEQ ID NO: 3835 - protein, 18 aa, synthetic construct
  REGION 1..18: note = Synthetic Peptide
EPKSCDTPPPCPRCPEPK

SEQ ID NO: 3836 - protein, 18 aa, synthetic construct
  REGION 1..18: note = Synthetic Peptide
PKSCDTPPPCPRCPEPKS

SEQ ID NO: 3837 - protein, 18 aa, synthetic construct
  REGION 1..18: note = Synthetic Peptide
KSCDTPPPCPRCPEPKSC

SEQ ID NO: 3838 - protein, 18 aa, synthetic construct
  REGION 1..18: note = Synthetic Peptide
SCDTPPPCPRCPEPKSCD

SEQ ID NO: 3839 - protein, 18 aa, synthetic construct
  REGION 1..18: note = Synthetic Peptide
CDTPPPCPRCPEPKSCDT

SEQ ID NO: 3840 - protein, 18 aa, synthetic construct
  REGION 1..18: note = Synthetic Peptide
DTPPPCPRCPEPKSCDTP

SEQ ID NO: 3841 - protein, 18 aa, synthetic construct
  REGION 1..18: note = Synthetic Peptide
TPPPCPRCPEPKSCDTPP

SEQ ID NO: 3842 - protein, 18 aa, synthetic construct
  REGION 1..18: note = Synthetic Peptide
PPPCPRCPEPKSCDTPPP

SEQ ID NO: 3843 - protein, 18 aa, synthetic construct
  REGION 1..18: note = Synthetic Peptide
PPCPRCPEPKSCDTPPPC

SEQ ID NO: 3844 - protein, 18 aa, synthetic construct
  REGION 1..18: note = Synthetic Peptide
PCPRCPEPKSCDTPPPCP

SEQ ID NO: 3845 - protein, 18 aa, synthetic construct
  REGION 1..18: note = Synthetic Peptide
CPRCPEPKSCDTPPPCPR

SEQ ID NO: 3846 - protein, 18 aa, synthetic construct
  REGION 1..18: note = Synthetic Peptide
PRCPEPKSCDTPPPCPRC

SEQ ID NO: 3847 - protein, 18 aa, synthetic construct
  REGION 1..18: note = Synthetic Peptide
RCPEPKSCDTPPPCPRCP

SEQ ID NO: 3848 - protein, 17 aa, synthetic construct
  REGION 1..17: note = Synthetic Peptide
ELKTPLGDTTHTCPRCP

SEQ ID NO: 3849 - protein, 17 aa, synthetic construct
  REGION 1..17: note = Synthetic Peptide
LKTPLGDTTHTCPRCPE

SEQ ID NO: 3850 - protein, 17 aa, synthetic construct
  REGION 1..17: note = Synthetic Peptide
KTPLGDTTHTCPRCPEP

SEQ ID NO: 3851 - protein, 17 aa, synthetic construct
  REGION 1..17: note = Synthetic Peptide
TPLGDTTHTCPRCPEPK

SEQ ID NO: 3852 - protein, 17 aa, synthetic construct
  REGION 1..17: note = Synthetic Peptide
PLGDTTHTCPRCPEPKS

SEQ ID NO: 3853 - protein, 17 aa, synthetic construct
  REGION 1..17: note = Synthetic Peptide
LGDTTHTCPRCPEPKSC

SEQ ID NO: 3854 - protein, 17 aa, synthetic construct
  REGION 1..17: note = Synthetic Peptide
GDTTHTCPRCPEPKSCD

SEQ ID NO: 3855 - protein, 17 aa, synthetic construct
  REGION 1..17: note = Synthetic Peptide
DTTHTCPRCPEPKSCDT

SEQ ID NO: 3856 - protein, 17 aa, synthetic construct
  REGION 1..17: note = Synthetic Peptide
TTHTCPRCPEPKSCDTP

SEQ ID NO: 3857 - protein, 17 aa, synthetic construct
  REGION 1..17: note = Synthetic Peptide
THTCPRCPEPKSCDTPP

SEQ ID NO: 3858 - protein, 17 aa, synthetic construct
  REGION 1..17: note = Synthetic Peptide
HTCPRCPEPKSCDTPPP

SEQ ID NO: 3859 - protein, 17 aa, synthetic construct
  REGION 1..17: note = Synthetic Peptide
TCPRCPEPKSCDTPPPC

SEQ ID NO: 3860 - protein, 17 aa, synthetic construct
  REGION 1..17: note = Synthetic Peptide
CPRCPEPKSCDTPPPCP

SEQ ID NO: 3861 - protein, 17 aa, synthetic construct
  REGION 1..17: note = Synthetic Peptide
PRCPEPKSCDTPPPCPR

SEQ ID NO: 3862 - protein, 17 aa, synthetic construct
  REGION 1..17: note = Synthetic Peptide
RCPEPKSCDTPPPCPRC

SEQ ID NO: 3863 - protein, 17 aa, synthetic construct
  REGION 1..17: note = Synthetic Peptide
CPEPKSCDTPPPCPRCP

SEQ ID NO: 3864 - protein, 17 aa, synthetic construct
  REGION 1..17: note = Synthetic Peptide
PEPKSCDTPPPCPRCPE

SEQ ID NO: 3865 - protein, 17 aa, synthetic construct
  REGION 1..17: note = Synthetic Peptide
EPKSCDTPPPCPRCPEP

SEQ ID NO: 3866 - protein, 17 aa, synthetic construct
  REGION 1..17: note = Synthetic Peptide
PKSCDTPPPCPRCPEPK

SEQ ID NO: 3867 - protein, 17 aa, synthetic construct
  REGION 1..17: note = Synthetic Peptide
KSCDTPPPCPRCPEPKS

SEQ ID NO: 3868 - protein, 17 aa, synthetic construct
  REGION 1..17: note = Synthetic Peptide
SCDTPPPCPRCPEPKSC

SEQ ID NO: 3869 - protein, 17 aa, synthetic construct
  REGION 1..17: note = Synthetic Peptide
CDTPPPCPRCPEPKSCD

SEQ ID NO: 3870 - protein, 17 aa, synthetic construct
  REGION 1..17: note = Synthetic Peptide
DTPPPCPRCPEPKSCDT

SEQ ID NO: 3871 - protein, 17 aa, synthetic construct
  REGION 1..17: note = Synthetic Peptide
TPPPCPRCPEPKSCDTP

SEQ ID NO: 3872 - protein, 17 aa, synthetic construct
  REGION 1..17: note = Synthetic Peptide
PPPCPRCPEPKSCDTPP

SEQ ID NO: 3873 - protein, 17 aa, synthetic construct
  REGION 1..17: note = Synthetic Peptide
PPCPRCPEPKSCDTPPP

SEQ ID NO: 3874 - protein, 17 aa, synthetic construct
  REGION 1..17: note = Synthetic Peptide
PCPRCPEPKSCDTPPPC

SEQ ID NO: 3875 - protein, 17 aa, synthetic construct
  REGION 1..17: note = Synthetic Peptide
CPRCPEPKSCDTPPPCP

SEQ ID NO: 3876 - protein, 17 aa, synthetic construct
  REGION 1..17: note = Synthetic Peptide
PRCPEPKSCDTPPPCPR

SEQ ID NO: 3877 - protein, 17 aa, synthetic construct
  REGION 1..17: note = Synthetic Peptide
RCPEPKSCDTPPPCPRC

SEQ ID NO: 3878 - protein, 17 aa, synthetic construct
  REGION 1..17: note = Synthetic Peptide
CPEPKSCDTPPPCPRCP

SEQ ID NO: 3879 - protein, 17 aa, synthetic construct
  REGION 1..17: note = Synthetic Peptide
PEPKSCDTPPPCPRCPE

SEQ ID NO: 3880 - protein, 17 aa, synthetic construct
  REGION 1..17: note = Synthetic Peptide
EPKSCDTPPPCPRCPEP

SEQ ID NO: 3881 - protein, 17 aa, synthetic construct
  REGION 1..17: note = Synthetic Peptide
PKSCDTPPPCPRCPEPK

SEQ ID NO: 3882 - protein, 17 aa, synthetic construct
  REGION 1..17: note = Synthetic Peptide
KSCDTPPPCPRCPEPKS

SEQ ID NO: 3883 - protein, 17 aa, synthetic construct
  REGION 1..17: note = Synthetic Peptide
SCDTPPPCPRCPEPKSC

SEQ ID NO: 3884 - protein, 17 aa, synthetic construct
  REGION 1..17: note = Synthetic Peptide
CDTPPPCPRCPEPKSCD

SEQ ID NO: 3885 - protein, 17 aa, synthetic construct
  REGION 1..17: note = Synthetic Peptide
DTPPPCPRCPEPKSCDT

SEQ ID NO: 3886 - protein, 17 aa, synthetic construct
  REGION 1..17: note = Synthetic Peptide
TPPPCPRCPEPKSCDTP

SEQ ID NO: 3887 - protein, 17 aa, synthetic construct
  REGION 1..17: note = Synthetic Peptide
PPPCPRCPEPKSCDTPP

SEQ ID NO: 3888 - protein, 17 aa, synthetic construct
  REGION 1..17: note = Synthetic Peptide
PPCPRCPEPKSCDTPPP

SEQ ID NO: 3889 - protein, 17 aa, synthetic construct
  REGION 1..17: note = Synthetic Peptide
PCPRCPEPKSCDTPPPC

SEQ ID NO: 3890 - protein, 17 aa, synthetic construct
  REGION 1..17: note = Synthetic Peptide
CPRCPEPKSCDTPPPCP

SEQ ID NO: 3891 - protein, 17 aa, synthetic construct
  REGION 1..17: note = Synthetic Peptide
PRCPEPKSCDTPPPCPR

SEQ ID NO: 3892 - protein, 17 aa, synthetic construct
  REGION 1..17: note = Synthetic Peptide
RCPEPKSCDTPPPCPRC

SEQ ID NO: 3893 - protein, 17 aa, synthetic construct
  REGION 1..17: note = Synthetic Peptide
CPEPKSCDTPPPCPRCP

SEQ ID NO: 3894 - protein, 16 aa, synthetic construct
  REGION 1..16: note = Synthetic Peptide
ELKTPLGDTTHTCPRC

SEQ ID NO: 3895 - protein, 16 aa, synthetic construct
  REGION 1..16: note = Synthetic Peptide
LKTPLGDTTHTCPRCP

SEQ ID NO: 3896 - protein, 16 aa, synthetic construct
  REGION 1..16: note = Synthetic Peptide
KTPLGDTTHTCPRCPE

SEQ ID NO: 3897 - protein, 16 aa, synthetic construct
  REGION 1..16: note = Synthetic Peptide
TPLGDTTHTCPRCPEP

SEQ ID NO: 3898 - protein, 16 aa, synthetic construct
  REGION 1..16: note = Synthetic Peptide
PLGDTTHTCPRCPEPK

SEQ ID NO: 3899 - protein, 16 aa, synthetic construct
  REGION 1..16: note = Synthetic Peptide
LGDTTHTCPRCPEPKS

SEQ ID NO: 3900 - protein, 16 aa, synthetic construct
  REGION 1..16: note = Synthetic Peptide
GDTTHTCPRCPEPKSC

SEQ ID NO: 3901 - protein, 16 aa, synthetic construct
  REGION 1..16: note = Synthetic Peptide
DTTHTCPRCPEPKSCD

SEQ ID NO: 3902 - protein, 16 aa, synthetic construct
  REGION 1..16: note = Synthetic Peptide
TTHTCPRCPEPKSCDT

SEQ ID NO: 3903 - protein, 16 aa, synthetic construct
  REGION 1..16: note = Synthetic Peptide
THTCPRCPEPKSCDTP

SEQ ID NO: 3904 - protein, 16 aa, synthetic construct
  REGION 1..16: note = Synthetic Peptide
HTCPRCPEPKSCDTPP

SEQ ID NO: 3905 - protein, 16 aa, synthetic construct
  REGION 1..16: note = Synthetic Peptide
TCPRCPEPKSCDTPPP

SEQ ID NO: 3906 - protein, 16 aa, synthetic construct
  REGION 1..16: note = Synthetic Peptide
CPRCPEPKSCDTPPPC

SEQ ID NO: 3907 - protein, 16 aa, synthetic construct
  REGION 1..16: note = Synthetic Peptide
PRCPEPKSCDTPPPCP

SEQ ID NO: 3908 - protein, 16 aa, synthetic construct
  REGION 1..16: note = Synthetic Peptide
RCPEPKSCDTPPPCPR

SEQ ID NO: 3909 - protein, 16 aa, synthetic construct
  REGION 1..16: note = Synthetic Peptide
CPEPKSCDTPPPCPRC

SEQ ID NO: 3910 - protein, 16 aa, synthetic construct
  REGION 1..16: note = Synthetic Peptide
PEPKSCDTPPPCPRCP

SEQ ID NO: 3911 - protein, 16 aa, synthetic construct
  REGION 1..16: note = Synthetic Peptide
EPKSCDTPPPCPRCPE

SEQ ID NO: 3912 - protein, 16 aa, synthetic construct
  REGION 1..16: note = Synthetic Peptide
PKSCDTPPPCPRCPEP

SEQ ID NO: 3913 - protein, 16 aa, synthetic construct
  REGION 1..16: note = Synthetic Peptide
KSCDTPPPCPRCPEPK

SEQ ID NO: 3914 - protein, 16 aa, synthetic construct
  REGION 1..16: note = Synthetic Peptide
SCDTPPPCPRCPEPKS

SEQ ID NO: 3915 - protein, 16 aa, synthetic construct
  REGION 1..16: note = Synthetic Peptide
CDTPPPCPRCPEPKSC

SEQ ID NO: 3916 - protein, 16 aa, synthetic construct
  REGION 1..16: note = Synthetic Peptide
DTPPPCPRCPEPKSCD

SEQ ID NO: 3917 - protein, 16 aa, synthetic construct
  REGION 1..16: note = Synthetic Peptide
TPPPCPRCPEPKSCDT

SEQ ID NO: 3918 - protein, 16 aa, synthetic construct
  REGION 1..16: note = Synthetic Peptide
PPPCPRCPEPKSCDTP

SEQ ID NO: 3919 - protein, 16 aa, synthetic construct
  REGION 1..16: note = Synthetic Peptide
PPCPRCPEPKSCDTPP

SEQ ID NO: 3920 - protein, 16 aa, synthetic construct
  REGION 1..16: note = Synthetic Peptide
PCPRCPEPKSCDTPPP

SEQ ID NO: 3921 - protein, 16 aa, synthetic construct
  REGION 1..16: note = Synthetic Peptide
CPRCPEPKSCDTPPPC

SEQ ID NO: 3922 - protein, 16 aa, synthetic construct
  REGION 1..16: note = Synthetic Peptide
PRCPEPKSCDTPPPCP

SEQ ID NO: 3923 - protein, 16 aa, synthetic construct
  REGION 1..16: note = Synthetic Peptide
RCPEPKSCDTPPPCPR

SEQ ID NO: 3924 - protein, 16 aa, synthetic construct
  REGION 1..16: note = Synthetic Peptide
CPEPKSCDTPPPCPRC

SEQ ID NO: 3925 - protein, 16 aa, synthetic construct
  REGION 1..16: note = Synthetic Peptide
PEPKSCDTPPPCPRCP

SEQ ID NO: 3926 - protein, 16 aa, synthetic construct
  REGION 1..16: note = Synthetic Peptide
EPKSCDTPPPCPRCPE

SEQ ID NO: 3927 - protein, 16 aa, synthetic construct
  REGION 1..16: note = Synthetic Peptide
PKSCDTPPPCPRCPEP

SEQ ID NO: 3928 - protein, 16 aa, synthetic construct
  REGION 1..16: note = Synthetic Peptide
KSCDTPPPCPRCPEPK

SEQ ID NO: 3929 - protein, 16 aa, synthetic construct
  REGION 1..16: note = Synthetic Peptide
SCDTPPPCPRCPEPKS

SEQ ID NO: 3930 - protein, 16 aa, synthetic construct
  REGION 1..16: note = Synthetic Peptide
CDTPPPCPRCPEPKSC

SEQ ID NO: 3931 - protein, 16 aa, synthetic construct
  REGION 1..16: note = Synthetic Peptide
DTPPPCPRCPEPKSCD

SEQ ID NO: 3932 - protein, 16 aa, synthetic construct
  REGION 1..16: note = Synthetic Peptide
TPPPCPRCPEPKSCDT

SEQ ID NO: 3933 - protein, 16 aa, synthetic construct
  REGION 1..16: note = Synthetic Peptide
PPPCPRCPEPKSCDTP

SEQ ID NO: 3934 - protein, 16 aa, synthetic construct
  REGION 1..16: note = Synthetic Peptide
PPCPRCPEPKSCDTPP

SEQ ID NO: 3935 - protein, 16 aa, synthetic construct
  REGION 1..16: note = Synthetic Peptide
PCPRCPEPKSCDTPPP

SEQ ID NO: 3936 - protein, 16 aa, synthetic construct
  REGION 1..16: note = Synthetic Peptide
CPRCPEPKSCDTPPPC

SEQ ID NO: 3937 - protein, 16 aa, synthetic construct
  REGION 1..16: note = Synthetic Peptide
PRCPEPKSCDTPPPCP

SEQ ID NO: 3938 - protein, 16 aa, synthetic construct
  REGION 1..16: note = Synthetic Peptide
RCPEPKSCDTPPPCPR

SEQ ID NO: 3939 - protein, 16 aa, synthetic construct
  REGION 1..16: note = Synthetic Peptide
CPEPKSCDTPPPCPRC

SEQ ID NO: 3940 - protein, 16 aa, synthetic construct
  REGION 1..16: note = Synthetic Peptide
PEPKSCDTPPPCPRCP

SEQ ID NO: 3941 - protein, 15 aa, synthetic construct
  REGION 1..15: note = Synthetic Peptide
ELKTPLGDTTHTCPR

SEQ ID NO: 3942 - protein, 15 aa, synthetic construct
  REGION 1..15: note = Synthetic Peptide
LKTPLGDTTHTCPRC

SEQ ID NO: 3943 - protein, 15 aa, synthetic construct
  REGION 1..15: note = Synthetic Peptide
KTPLGDTTHTCPRCP

SEQ ID NO: 3944 - protein, 15 aa, synthetic construct
  REGION 1..15: note = Synthetic Peptide
TPLGDTTHTCPRCPE

SEQ ID NO: 3945 - protein, 15 aa, synthetic construct
  REGION 1..15: note = Synthetic Peptide
PLGDTTHTCPRCPEP

SEQ ID NO: 3946 - protein, 15 aa, synthetic construct
  REGION 1..15: note = Synthetic Peptide
LGDTTHTCPRCPEPK

SEQ ID NO: 3947 - protein, 15 aa, synthetic construct
  REGION 1..15: note = Synthetic Peptide
GDTTHTCPRCPEPKS

SEQ ID NO: 3948 - protein, 15 aa, synthetic construct
  REGION 1..15: note = Synthetic Peptide
DTTHTCPRCPEPKSC

SEQ ID NO: 3949 - protein, 15 aa, synthetic construct
  REGION 1..15: note = Synthetic Peptide
TTHTCPRCPEPKSCD

SEQ ID NO: 3950 - protein, 15 aa, synthetic construct
  REGION 1..15: note = Synthetic Peptide
THTCPRCPEPKSCDT

SEQ ID NO: 3951 - protein, 15 aa, synthetic construct
  REGION 1..15: note = Synthetic Peptide
HTCPRCPEPKSCDTP

SEQ ID NO: 3952 - protein, 15 aa, synthetic construct
  REGION 1..15: note = Synthetic Peptide
TCPRCPEPKSCDTPP

SEQ ID NO: 3953 - protein, 15 aa, synthetic construct
  REGION 1..15: note = Synthetic Peptide
CPRCPEPKSCDTPPP

SEQ ID NO: 3954 - protein, 15 aa, synthetic construct
  REGION 1..15: note = Synthetic Peptide
PRCPEPKSCDTPPPC

SEQ ID NO: 3955 - protein, 15 aa, synthetic construct
  REGION 1..15: note = Synthetic Peptide
RCPEPKSCDTPPPCP

SEQ ID NO: 3956 - protein, 15 aa, synthetic construct
  REGION 1..15: note = Synthetic Peptide
CPEPKSCDTPPPCPR

SEQ ID NO: 3957 - protein, 15 aa, synthetic construct
  REGION 1..15: note = Synthetic Peptide
PEPKSCDTPPPCPRC

SEQ ID NO: 3958 - protein, 15 aa, synthetic construct
  REGION 1..15: note = Synthetic Peptide
EPKSCDTPPPCPRCP

SEQ ID NO: 3959 - protein, 15 aa, synthetic construct
  REGION 1..15: note = Synthetic Peptide
PKSCDTPPPCPRCPE

SEQ ID NO: 3960 - protein, 15 aa, synthetic construct
  REGION 1..15: note = Synthetic Peptide
KSCDTPPPCPRCPEP

SEQ ID NO: 3961 - protein, 15 aa, synthetic construct
  REGION 1..15: note = Synthetic Peptide
SCDTPPPCPRCPEPK

SEQ ID NO: 3962 - protein, 15 aa, synthetic construct
  REGION 1..15: note = Synthetic Peptide
CDTPPPCPRCPEPKS

SEQ ID NO: 3963 - protein, 15 aa, synthetic construct
  REGION 1..15: note = Synthetic Peptide
DTPPPCPRCPEPKSC

SEQ ID NO: 3964 - protein, 15 aa, synthetic construct
  REGION 1..15: note = Synthetic Peptide
TPPPCPRCPEPKSCD

SEQ ID NO: 3965 - protein, 15 aa, synthetic construct
  REGION 1..15: note = Synthetic Peptide
PPPCPRCPEPKSCDT

SEQ ID NO: 3966 - protein, 15 aa, synthetic construct
  REGION 1..15: note = Synthetic Peptide
PPCPRCPEPKSCDTP

SEQ ID NO: 3967 - protein, 15 aa, synthetic construct
  REGION 1..15: note = Synthetic Peptide
PCPRCPEPKSCDTPP

SEQ ID NO: 3968 - protein, 15 aa, synthetic construct
  REGION 1..15: note = Synthetic Peptide
CPRCPEPKSCDTPPP

SEQ ID NO: 3969 - protein, 15 aa, synthetic construct
  REGION 1..15: note = Synthetic Peptide
PRCPEPKSCDTPPPC

SEQ ID NO: 3970 - protein, 15 aa, synthetic construct
  REGION 1..15: note = Synthetic Peptide
RCPEPKSCDTPPPCP

SEQ ID NO: 3971 - protein, 15 aa, synthetic construct
  REGION 1..15: note = Synthetic Peptide
CPEPKSCDTPPPCPR

SEQ ID NO: 3972 - protein, 15 aa, synthetic construct
  REGION 1..15: note = Synthetic Peptide
PEPKSCDTPPPCPRC

SEQ ID NO: 3973 - protein, 15 aa, synthetic construct
  REGION 1..15: note = Synthetic Peptide
EPKSCDTPPPCPRCP

SEQ ID NO: 3974 - protein, 15 aa, synthetic construct
  REGION 1..15: note = Synthetic Peptide
PKSCDTPPPCPRCPE

SEQ ID NO: 3975 - protein, 15 aa, synthetic construct
  REGION 1..15: note = Synthetic Peptide
KSCDTPPPCPRCPEP

SEQ ID NO: 3976 - protein, 15 aa, synthetic construct
  REGION 1..15: note = Synthetic Peptide
SCDTPPPCPRCPEPK

SEQ ID NO: 3977 - protein, 15 aa, synthetic construct
  REGION 1..15: note = Synthetic Peptide
CDTPPPCPRCPEPKS

SEQ ID NO: 3978 - protein, 15 aa, synthetic construct
  REGION 1..15: note = Synthetic Peptide
DTPPPCPRCPEPKSC

SEQ ID NO: 3979 - protein, 15 aa, synthetic construct
  REGION 1..15: note = Synthetic Peptide
TPPPCPRCPEPKSCD

SEQ ID NO: 3980 - protein, 15 aa, synthetic construct
  REGION 1..15: note = Synthetic Peptide
PPPCPRCPEPKSCDT

SEQ ID NO: 3981 - protein, 15 aa, synthetic construct
  REGION 1..15: note = Synthetic Peptide
PPCPRCPEPKSCDTP

SEQ ID NO: 3982 - protein, 15 aa, synthetic construct
  REGION 1..15: note = Synthetic Peptide
PCPRCPEPKSCDTPP

SEQ ID NO: 3983 - protein, 15 aa, synthetic construct
  REGION 1..15: note = Synthetic Peptide
CPRCPEPKSCDTPPP

SEQ ID NO: 3984 - protein, 15 aa, synthetic construct
  REGION 1..15: note = Synthetic Peptide
PRCPEPKSCDTPPPC

SEQ ID NO: 3985 - protein, 15 aa, synthetic construct
  REGION 1..15: note = Synthetic Peptide
RCPEPKSCDTPPPCP

SEQ ID NO: 3986 - protein, 15 aa, synthetic construct
  REGION 1..15: note = Synthetic Peptide
CPEPKSCDTPPPCPR

SEQ ID NO: 3987 - protein, 15 aa, synthetic construct
  REGION 1..15: note = Synthetic Peptide
PEPKSCDTPPPCPRC

SEQ ID NO: 3988 - protein, 15 aa, synthetic construct
  REGION 1..15: note = Synthetic Peptide
EPKSCDTPPPCPRCP

SEQ ID NO: 3989 - protein, 14 aa, synthetic construct
  REGION 1..14: note = Synthetic Peptide
ELKTPLGDTTHTCP

SEQ ID NO: 3990 - protein, 14 aa, synthetic construct
  REGION 1..14: note = Synthetic Peptide
LKTPLGDTTHTCPR

SEQ ID NO: 3991 - protein, 14 aa, synthetic construct
  REGION 1..14: note = Synthetic Peptide
KTPLGDTTHTCPRC

SEQ ID NO: 3992 - protein, 14 aa, synthetic construct
  REGION 1..14: note = Synthetic Peptide
TPLGDTTHTCPRCP

SEQ ID NO: 3993 - protein, 14 aa, synthetic construct
  REGION 1..14: note = Synthetic Peptide
PLGDTTHTCPRCPE

SEQ ID NO: 3994 - protein, 14 aa, synthetic construct
  REGION 1..14: note = Synthetic Peptide
LGDTTHTCPRCPEP

SEQ ID NO: 3995 - protein, 14 aa, synthetic construct
  REGION 1..14: note = Synthetic Peptide
GDTTHTCPRCPEPK

SEQ ID NO: 3996 - protein, 14 aa, synthetic construct
  REGION 1..14: note = Synthetic Peptide
DTTHTCPRCPEPKS

SEQ ID NO: 3997 - protein, 14 aa, synthetic construct
  REGION 1..14: note = Synthetic Peptide
TTHTCPRCPEPKSC

SEQ ID NO: 3998 - protein, 14 aa, synthetic construct
  REGION 1..14: note = Synthetic Peptide
THTCPRCPEPKSCD

SEQ ID NO: 3999 - protein, 14 aa, synthetic construct
  REGION 1..14: note = Synthetic Peptide
HTCPRCPEPKSCDT

SEQ ID NO: 4000 - protein, 14 aa, synthetic construct
  REGION 1..14: note = Synthetic Peptide
TCPRCPEPKSCDTP

SEQ ID NO: 4001 - protein, 14 aa, synthetic construct
  REGION 1..14: note = Synthetic Peptide
CPRCPEPKSCDTPP

SEQ ID NO: 4002 - protein, 14 aa, synthetic construct
  REGION 1..14: note = Synthetic Peptide
PRCPEPKSCDTPPP

SEQ ID NO: 4003 - protein, 14 aa, synthetic construct
  REGION 1..14: note = Synthetic Peptide
RCPEPKSCDTPPPC

SEQ ID NO: 4004 - protein, 14 aa, synthetic construct
  REGION 1..14: note = Synthetic Peptide
CPEPKSCDTPPPCP

SEQ ID NO: 4005 - protein, 14 aa, synthetic construct
  REGION 1..14: note = Synthetic Peptide
PEPKSCDTPPPCPR

SEQ ID NO: 4006 - protein, 14 aa, synthetic construct
  REGION 1..14: note = Synthetic Peptide
EPKSCDTPPPCPRC

SEQ ID NO: 4007 - protein, 14 aa, synthetic construct
  REGION 1..14: note = Synthetic Peptide
PKSCDTPPPCPRCP

SEQ ID NO: 4008 - protein, 14 aa, synthetic construct
  REGION 1..14: note = Synthetic Peptide
KSCDTPPPCPRCPE

SEQ ID NO: 4009 - protein, 14 aa, synthetic construct
  REGION 1..14: note = Synthetic Peptide
SCDTPPPCPRCPEP

SEQ ID NO: 4010 - protein, 14 aa, synthetic construct
  REGION 1..14: note = Synthetic Peptide
CDTPPPCPRCPEPK

SEQ ID NO: 4011 - protein, 14 aa, synthetic construct
  REGION 1..14: note = Synthetic Peptide
DTPPPCPRCPEPKS

SEQ ID NO: 4012 - protein, 14 aa, synthetic construct
  REGION 1..14: note = Synthetic Peptide
TPPPCPRCPEPKSC

SEQ ID NO: 4013 - protein, 14 aa, synthetic construct
  REGION 1..14: note = Synthetic Peptide
PPPCPRCPEPKSCD

SEQ ID NO: 4014 - protein, 14 aa, synthetic construct
  REGION 1..14: note = Synthetic Peptide
PPCPRCPEPKSCDT

SEQ ID NO: 4015 - protein, 14 aa, synthetic construct
  REGION 1..14: note = Synthetic Peptide
PCPRCPEPKSCDTP

SEQ ID NO: 4016 - protein, 14 aa, synthetic construct
  REGION 1..14: note = Synthetic Peptide
CPRCPEPKSCDTPP

SEQ ID NO: 4017 - protein, 14 aa, synthetic construct
  REGION 1..14: note = Synthetic Peptide
PRCPEPKSCDTPPP

SEQ ID NO: 4018 - protein, 14 aa, synthetic construct
  REGION 1..14: note = Synthetic Peptide
RCPEPKSCDTPPPC

SEQ ID NO: 4019 - protein, 14 aa, synthetic construct
  REGION 1..14: note = Synthetic Peptide
CPEPKSCDTPPPCP

SEQ ID NO: 4020 - protein, 14 aa, synthetic construct
  REGION 1..14: note = Synthetic Peptide
PEPKSCDTPPPCPR

SEQ ID NO: 4021 - protein, 14 aa, synthetic construct
  REGION 1..14: note = Synthetic Peptide
EPKSCDTPPPCPRC

SEQ ID NO: 4022 - protein, 14 aa, synthetic construct
  REGION 1..14: note = Synthetic Peptide
PKSCDTPPPCPRCP

SEQ ID NO: 4023 - protein, 14 aa, synthetic construct
  REGION 1..14: note = Synthetic Peptide
KSCDTPPPCPRCPE

SEQ ID NO: 4024 - protein, 14 aa, synthetic construct
  REGION 1..14: note = Synthetic Peptide
SCDTPPPCPRCPEP

SEQ ID NO: 4025 - protein, 14 aa, synthetic construct
  REGION 1..14: note = Synthetic Peptide
CDTPPPCPRCPEPK

SEQ ID NO: 4026 - protein, 14 aa, synthetic construct
  REGION 1..14: note = Synthetic Peptide
DTPPPCPRCPEPKS

SEQ ID NO: 4027 - protein, 14 aa, synthetic construct
  REGION 1..14: note = Synthetic Peptide
TPPPCPRCPEPKSC

SEQ ID NO: 4028 - protein, 14 aa, synthetic construct
  REGION 1..14: note = Synthetic Peptide
PPPCPRCPEPKSCD

SEQ ID NO: 4029 - protein, 14 aa, synthetic construct
  REGION 1..14: note = Synthetic Peptide
PPCPRCPEPKSCDT

SEQ ID NO: 4030 - protein, 14 aa, synthetic construct
  REGION 1..14: note = Synthetic Peptide
PCPRCPEPKSCDTP

SEQ ID NO: 4031 - protein, 14 aa, synthetic construct
  REGION 1..14: note = Synthetic Peptide
CPRCPEPKSCDTPP

SEQ ID NO: 4032 - protein, 14 aa, synthetic construct
  REGION 1..14: note = Synthetic Peptide
PRCPEPKSCDTPPP

SEQ ID NO: 4033 - protein, 14 aa, synthetic construct
  REGION 1..14: note = Synthetic Peptide
RCPEPKSCDTPPPC

SEQ ID NO: 4034 - protein, 14 aa, synthetic construct
  REGION 1..14: note = Synthetic Peptide
CPEPKSCDTPPPCP

SEQ ID NO: 4035 - protein, 14 aa, synthetic construct
  REGION 1..14: note = Synthetic Peptide
PEPKSCDTPPPCPR

SEQ ID NO: 4036 - protein, 14 aa, synthetic construct
  REGION 1..14: note = Synthetic Peptide
EPKSCDTPPPCPRC

SEQ ID NO: 4037 - protein, 14 aa, synthetic construct
  REGION 1..14: note = Synthetic Peptide
PKSCDTPPPCPRCP

SEQ ID NO: 4038 - protein, 13 aa, synthetic construct
  REGION 1..13: note = Synthetic Peptide
ELKTPLGDTTHTC

SEQ ID NO: 4039 - protein, 13 aa, synthetic construct
  REGION 1..13: note = Synthetic Peptide
LKTPLGDTTHTCP

SEQ ID NO: 4040 - protein, 13 aa, synthetic construct
  REGION 1..13: note = Synthetic Peptide
KTPLGDTTHTCPR

SEQ ID NO: 4041 - protein, 13 aa, synthetic construct
  REGION 1..13: note = Synthetic Peptide
TPLGDTTHTCPRC

SEQ ID NO: 4042 - protein, 13 aa, synthetic construct
  REGION 1..13: note = Synthetic Peptide
PLGDTTHTCPRCP

SEQ ID NO: 4043 - protein, 13 aa, synthetic construct
  REGION 1..13: note = Synthetic Peptide
LGDTTHTCPRCPE

SEQ ID NO: 4044 - protein, 13 aa, synthetic construct
  REGION 1..13: note = Synthetic Peptide
GDTTHTCPRCPEP

SEQ ID NO: 4045 - protein, 13 aa, synthetic construct
  REGION 1..13: note = Synthetic Peptide
DTTHTCPRCPEPK

SEQ ID NO: 4046 - protein, 13 aa, synthetic construct
  REGION 1..13: note = Synthetic Peptide
TTHTCPRCPEPKS

SEQ ID NO: 4047 - protein, 13 aa, synthetic construct
  REGION 1..13: note = Synthetic Peptide
THTCPRCPEPKSC

SEQ ID NO: 4048 - protein, 13 aa, synthetic construct
  REGION 1..13: note = Synthetic Peptide
HTCPRCPEPKSCD

SEQ ID NO: 4049 - protein, 13 aa, synthetic construct
  REGION 1..13: note = Synthetic Peptide
TCPRCPEPKSCDT

SEQ ID NO: 4050 - protein, 13 aa, synthetic construct
  REGION 1..13: note = Synthetic Peptide
CPRCPEPKSCDTP

SEQ ID NO: 4051 - protein, 13 aa, synthetic construct
  REGION 1..13: note = Synthetic Peptide
PRCPEPKSCDTPP

SEQ ID NO: 4052 - protein, 13 aa, synthetic construct
  REGION 1..13: note = Synthetic Peptide
RCPEPKSCDTPPP

SEQ ID NO: 4053 - protein, 13 aa, synthetic construct
  REGION 1..13: note = Synthetic Peptide
CPEPKSCDTPPPC

SEQ ID NO: 4054 - protein, 13 aa, synthetic construct
  REGION 1..13: note = Synthetic Peptide
PEPKSCDTPPPCP

SEQ ID NO: 4055 - protein, 13 aa, synthetic construct
  REGION 1..13: note = Synthetic Peptide
EPKSCDTPPPCPR

SEQ ID NO: 4056 - protein, 13 aa, synthetic construct
  REGION 1..13: note = Synthetic Peptide
PKSCDTPPPCPRC

SEQ ID NO: 4057 - protein, 13 aa, synthetic construct
  REGION 1..13: note = Synthetic Peptide
KSCDTPPPCPRCP

SEQ ID NO: 4058 - protein, 13 aa, synthetic construct
  REGION 1..13: note = Synthetic Peptide
SCDTPPPCPRCPE

SEQ ID NO: 4059 - protein, 13 aa, synthetic construct
  REGION 1..13: note = Synthetic Peptide
CDTPPPCPRCPEP

SEQ ID NO: 4060 - protein, 13 aa, synthetic construct
  REGION 1..13: note = Synthetic Peptide
DTPPPCPRCPEPK

SEQ ID NO: 4061 - protein, 13 aa, synthetic construct
  REGION 1..13: note = Synthetic Peptide
TPPPCPRCPEPKS

SEQ ID NO: 4062 - protein, 13 aa, synthetic construct
  REGION 1..13: note = Synthetic Peptide
PPPCPRCPEPKSC

SEQ ID NO: 4063 - protein, 13 aa, synthetic construct
  REGION 1..13: note = Synthetic Peptide
PPCPRCPEPKSCD

SEQ ID NO: 4064 - protein, 13 aa, synthetic construct
  REGION 1..13: note = Synthetic Peptide
PCPRCPEPKSCDT

SEQ ID NO: 4065 - protein, 13 aa, synthetic construct
  REGION 1..13: note = Synthetic Peptide
CPRCPEPKSCDTP

SEQ ID NO: 4066 - protein, 13 aa, synthetic construct
  REGION 1..13: note = Synthetic Peptide
PRCPEPKSCDTPP

SEQ ID NO: 4067 - protein, 13 aa, synthetic construct
  REGION 1..13: note = Synthetic Peptide
RCPEPKSCDTPPP

SEQ ID NO: 4068 - protein, 13 aa, synthetic construct
  REGION 1..13: note = Synthetic Peptide
CPEPKSCDTPPPC

SEQ ID NO: 4069 - protein, 13 aa, synthetic construct
  REGION 1..13: note = Synthetic Peptide
PEPKSCDTPPPCP

SEQ ID NO: 4070 - protein, 13 aa, synthetic construct
  REGION 1..13: note = Synthetic Peptide
EPKSCDTPPPCPR

SEQ ID NO: 4071 - protein, 13 aa, synthetic construct
  REGION 1..13: note = Synthetic Peptide
PKSCDTPPPCPRC

SEQ ID NO: 4072 - protein, 13 aa, synthetic construct
  REGION 1..13: note = Synthetic Peptide
KSCDTPPPCPRCP

SEQ ID NO: 4073 - protein, 13 aa, synthetic construct
  REGION 1..13: note = Synthetic Peptide
SCDTPPPCPRCPE

SEQ ID NO: 4074 - protein, 13 aa, synthetic construct
  REGION 1..13: note = Synthetic Peptide
CDTPPPCPRCPEP

SEQ ID NO: 4075 - protein, 13 aa, synthetic construct
  REGION 1..13: note = Synthetic Peptide
DTPPPCPRCPEPK

SEQ ID NO: 4076 - protein, 13 aa, synthetic construct
  REGION 1..13: note = Synthetic Peptide
TPPPCPRCPEPKS

SEQ ID NO: 4077 - protein, 13 aa, synthetic construct
  REGION 1..13: note = Synthetic Peptide
PPPCPRCPEPKSC

SEQ ID NO: 4078 - protein, 13 aa, synthetic construct
  REGION 1..13: note = Synthetic Peptide
PPCPRCPEPKSCD

SEQ ID NO: 4079 - protein, 13 aa, synthetic construct
  REGION 1..13: note = Synthetic Peptide
PCPRCPEPKSCDT

SEQ ID NO: 4080 - protein, 13 aa, synthetic construct
  REGION 1..13: note = Synthetic Peptide
CPRCPEPKSCDTP

SEQ ID NO: 4081 - protein, 13 aa, synthetic construct
  REGION 1..13: note = Synthetic Peptide
PRCPEPKSCDTPP

SEQ ID NO: 4082 - protein, 13 aa, synthetic construct
  REGION 1..13: note = Synthetic Peptide
RCPEPKSCDTPPP

SEQ ID NO: 4083 - protein, 13 aa, synthetic construct
  REGION 1..13: note = Synthetic Peptide
CPEPKSCDTPPPC

SEQ ID NO: 4084 - protein, 13 aa, synthetic construct
  REGION 1..13: note = Synthetic Peptide
PEPKSCDTPPPCP

SEQ ID NO: 4085 - protein, 13 aa, synthetic construct
  REGION 1..13: note = Synthetic Peptide
EPKSCDTPPPCPR

SEQ ID NO: 4086 - protein, 13 aa, synthetic construct
  REGION 1..13: note = Synthetic Peptide
PKSCDTPPPCPRC

SEQ ID NO: 4087 - protein, 13 aa, synthetic construct
  REGION 1..13: note = Synthetic Peptide
KSCDTPPPCPRCP

SEQ ID NO: 4088 - protein, 12 aa, synthetic construct
  REGION 1..12: note = Synthetic Peptide
ELKTPLGDTTHT

SEQ ID NO: 4089 - protein, 12 aa, synthetic construct
  REGION 1..12: note = Synthetic Peptide
LKTPLGDTTHTC

SEQ ID NO: 4090 - protein, 12 aa, synthetic construct
  REGION 1..12: note = Synthetic Peptide
KTPLGDTTHTCP

SEQ ID NO: 4091 - protein, 12 aa, synthetic construct
  REGION 1..12: note = Synthetic Peptide
TPLGDTTHTCPR

SEQ ID NO: 4092 - protein, 12 aa, synthetic construct
  REGION 1..12: note = Synthetic Peptide
PLGDTTHTCPRC

SEQ ID NO: 4093 - protein, 12 aa, synthetic construct
  REGION 1..12: note = Synthetic Peptide
LGDTTHTCPRCP

SEQ ID NO: 4094 - protein, 12 aa, synthetic construct
  REGION 1..12: note = Synthetic Peptide
GDTTHTCPRCPE

SEQ ID NO: 4095 - protein, 12 aa, synthetic construct
  REGION 1..12: note = Synthetic Peptide
DTTHTCPRCPEP

SEQ ID NO: 4096 - protein, 12 aa, synthetic construct
  REGION 1..12: note = Synthetic Peptide
TTHTCPRCPEPK

SEQ ID NO: 4097 - protein, 12 aa, synthetic construct
  REGION 1..12: note = Synthetic Peptide
THTCPRCPEPKS

SEQ ID NO: 4098 - protein, 12 aa, synthetic construct
  REGION 1..12: note = Synthetic Peptide
HTCPRCPEPKSC

SEQ ID NO: 4099 - protein, 12 aa, synthetic construct
  REGION 1..12: note = Synthetic Peptide
TCPRCPEPKSCD

SEQ ID NO: 4100 - protein, 12 aa, synthetic construct
  REGION 1..12: note = Synthetic Peptide
CPRCPEPKSCDT

SEQ ID NO: 4101 - protein, 12 aa, synthetic construct
  REGION 1..12: note = Synthetic Peptide
PRCPEPKSCDTP

SEQ ID NO: 4102 - protein, 12 aa, synthetic construct
  REGION 1..12: note = Synthetic Peptide
RCPEPKSCDTPP

SEQ ID NO: 4103 - protein, 12 aa, synthetic construct
  REGION 1..12: note = Synthetic Peptide
CPEPKSCDTPPP

SEQ ID NO: 4104 - protein, 12 aa, synthetic construct
  REGION 1..12: note = Synthetic Peptide
PEPKSCDTPPPC

SEQ ID NO: 4105 - protein, 12 aa, synthetic construct
  REGION 1..12: note = Synthetic Peptide
EPKSCDTPPPCP

SEQ ID NO: 4106 - protein, 12 aa, synthetic construct
  REGION 1..12: note = Synthetic Peptide
PKSCDTPPPCPR

SEQ ID NO: 4107 - protein, 12 aa, synthetic construct
  REGION 1..12: note = Synthetic Peptide
KSCDTPPPCPRC

SEQ ID NO: 4108 - protein, 12 aa, synthetic construct
  REGION 1..12: note = Synthetic Peptide
SCDTPPPCPRCP

SEQ ID NO: 4109 - protein, 12 aa, synthetic construct
  REGION 1..12: note = Synthetic Peptide
CDTPPPCPRCPE

SEQ ID NO: 4110 - protein, 12 aa, synthetic construct
  REGION 1..12: note = Synthetic Peptide
DTPPPCPRCPEP

SEQ ID NO: 4111 - protein, 12 aa, synthetic construct
  REGION 1..12: note = Synthetic Peptide
TPPPCPRCPEPK

SEQ ID NO: 4112 - protein, 12 aa, synthetic construct
  REGION 1..12: note = Synthetic Peptide
PPPCPRCPEPKS

SEQ ID NO: 4113 - protein, 12 aa, synthetic construct
  REGION 1..12: note = Synthetic Peptide
PPCPRCPEPKSC

SEQ ID NO: 4114 - protein, 12 aa, synthetic construct
  REGION 1..12: note = Synthetic Peptide
PCPRCPEPKSCD

SEQ ID NO: 4115 - protein, 12 aa, synthetic construct
  REGION 1..12: note = Synthetic Peptide
CPRCPEPKSCDT

SEQ ID NO: 4116 - protein, 12 aa, synthetic construct
  REGION 1..12: note = Synthetic Peptide
PRCPEPKSCDTP

SEQ ID NO: 4117 - protein, 12 aa, synthetic construct
  REGION 1..12: note = Synthetic Peptide
RCPEPKSCDTPP

SEQ ID NO: 4118 - protein, 12 aa, synthetic construct
  REGION 1..12: note = Synthetic Peptide
CPEPKSCDTPPP

SEQ ID NO: 4119 - protein, 12 aa, synthetic construct
  REGION 1..12: note = Synthetic Peptide
PEPKSCDTPPPC

SEQ ID NO: 4120 - protein, 12 aa, synthetic construct
  REGION 1..12: note = Synthetic Peptide
EPKSCDTPPPCP

SEQ ID NO: 4121 - protein, 12 aa, synthetic construct
  REGION 1..12: note = Synthetic Peptide
PKSCDTPPPCPR

SEQ ID NO: 4122 - protein, 12 aa, synthetic construct
  REGION 1..12: note = Synthetic Peptide
KSCDTPPPCPRC

SEQ ID NO: 4123 - protein, 12 aa, synthetic construct
  REGION 1..12: note = Synthetic Peptide
SCDTPPPCPRCP

SEQ ID NO: 4124 - protein, 12 aa, synthetic construct
  REGION 1..12: note = Synthetic Peptide
CDTPPPCPRCPE

SEQ ID NO: 4125 - protein, 12 aa, synthetic construct
  REGION 1..12: note = Synthetic Peptide
DTPPPCPRCPEP

SEQ ID NO: 4126 - protein, 12 aa, synthetic construct
  REGION 1..12: note = Synthetic Peptide
TPPPCPRCPEPK

SEQ ID NO: 4127 - protein, 12 aa, synthetic construct
  REGION 1..12: note = Synthetic Peptide
PPPCPRCPEPKS

SEQ ID NO: 4128 - protein, 12 aa, synthetic construct
  REGION 1..12: note = Synthetic Peptide
PPCPRCPEPKSC

SEQ ID NO: 4129 - protein, 12 aa, synthetic construct
  REGION 1..12: note = Synthetic Peptide
PCPRCPEPKSCD

SEQ ID NO: 4130 - protein, 12 aa, synthetic construct
  REGION 1..12: note = Synthetic Peptide
CPRCPEPKSCDT

SEQ ID NO: 4131 - protein, 12 aa, synthetic construct
  REGION 1..12: note = Synthetic Peptide
PRCPEPKSCDTP

SEQ ID NO: 4132 - protein, 12 aa, synthetic construct
  REGION 1..12: note = Synthetic Peptide
RCPEPKSCDTPP

SEQ ID NO: 4133 - protein, 12 aa, synthetic construct
  REGION 1..12: note = Synthetic Peptide
CPEPKSCDTPPP

SEQ ID NO: 4134 - protein, 12 aa, synthetic construct
  REGION 1..12: note = Synthetic Peptide
PEPKSCDTPPPC

SEQ ID NO: 4135 - protein, 12 aa, synthetic construct
  REGION 1..12: note = Synthetic Peptide
EPKSCDTPPPCP

SEQ ID NO: 4136 - protein, 12 aa, synthetic construct
  REGION 1..12: note = Synthetic Peptide
PKSCDTPPPCPR

SEQ ID NO: 4137 - protein, 12 aa, synthetic construct
  REGION 1..12: note = Synthetic Peptide
KSCDTPPPCPRC

SEQ ID NO: 4138 - protein, 12 aa, synthetic construct
  REGION 1..12: note = Synthetic Peptide
SCDTPPPCPRCP

SEQ ID NO: 4139 - protein, 11 aa, synthetic construct
  REGION 1..11: note = Synthetic Peptide
ELKTPLGDTTH

SEQ ID NO: 4140 - protein, 11 aa, synthetic construct
  REGION 1..11: note = Synthetic Peptide
LKTPLGDTTHT

SEQ ID NO: 4141 - protein, 11 aa, synthetic construct
  REGION 1..11: note = Synthetic Peptide
KTPLGDTTHTC

SEQ ID NO: 4142 - protein, 11 aa, synthetic construct
  REGION 1..11: note = Synthetic Peptide
TPLGDTTHTCP

SEQ ID NO: 4143 - protein, 11 aa, synthetic construct
  REGION 1..11: note = Synthetic Peptide
PLGDTTHTCPR

SEQ ID NO: 4144 - protein, 11 aa, synthetic construct
  REGION 1..11: note = Synthetic Peptide
LGDTTHTCPRC

SEQ ID NO: 4145 - protein, 11 aa, synthetic construct
  REGION 1..11: note = Synthetic Peptide
GDTTHTCPRCP

SEQ ID NO: 4146 - protein, 11 aa, synthetic construct
  REGION 1..11: note = Synthetic Peptide
DTTHTCPRCPE

SEQ ID NO: 4147 - protein, 11 aa, synthetic construct
  REGION 1..11: note = Synthetic Peptide
TTHTCPRCPEP

SEQ ID NO: 4148 - protein, 11 aa, synthetic construct
  REGION 1..11: note = Synthetic Peptide
THTCPRCPEPK

SEQ ID NO: 4149 - protein, 11 aa, synthetic construct
  REGION 1..11: note = Synthetic Peptide
HTCPRCPEPKS

SEQ ID NO: 4150 - protein, 11 aa, synthetic construct
  REGION 1..11: note = Synthetic Peptide
TCPRCPEPKSC

SEQ ID NO: 4151 - protein, 11 aa, synthetic construct
  REGION 1..11: note = Synthetic Peptide
CPRCPEPKSCD

SEQ ID NO: 4152 - protein, 11 aa, synthetic construct
  REGION 1..11: note = Synthetic Peptide
PRCPEPKSCDT

SEQ ID NO: 4153 - protein, 11 aa, synthetic construct
  REGION 1..11: note = Synthetic Peptide
RCPEPKSCDTP

SEQ ID NO: 4154 - protein, 11 aa, synthetic construct
  REGION 1..11: note = Synthetic Peptide
CPEPKSCDTPP

SEQ ID NO: 4155 - protein, 11 aa, synthetic construct
  REGION 1..11: note = Synthetic Peptide
PEPKSCDTPPP

SEQ ID NO: 4156 - protein, 11 aa, synthetic construct
  REGION 1..11: note = Synthetic Peptide
EPKSCDTPPPC

SEQ ID NO: 4157 - protein, 11 aa, synthetic construct
  REGION 1..11: note = Synthetic Peptide
PKSCDTPPPCP

SEQ ID NO: 4158 - protein, 11 aa, synthetic construct
  REGION 1..11: note = Synthetic Peptide
KSCDTPPPCPR

SEQ ID NO: 4159 - protein, 11 aa, synthetic construct
  REGION 1..11: note = Synthetic Peptide
SCDTPPPCPRC

SEQ ID NO: 4160 - protein, 11 aa, synthetic construct
  REGION 1..11: note = Synthetic Peptide
CDTPPPCPRCP

SEQ ID NO: 4161 - protein, 11 aa, synthetic construct
  REGION 1..11: note = Synthetic Peptide
DTPPPCPRCPE

SEQ ID NO: 4162 - protein, 11 aa, synthetic construct
  REGION 1..11: note = Synthetic Peptide
TPPPCPRCPEP

SEQ ID NO: 4163 - protein, 11 aa, synthetic construct
  REGION 1..11: note = Synthetic Peptide
PPPCPRCPEPK

SEQ ID NO: 4164 - protein, 11 aa, synthetic construct
  REGION 1..11: note = Synthetic Peptide
PPCPRCPEPKS

SEQ ID NO: 4165 - protein, 11 aa, synthetic construct
  REGION 1..11: note = Synthetic Peptide
PCPRCPEPKSC

SEQ ID NO: 4166 - protein, 11 aa, synthetic construct
  REGION 1..11: note = Synthetic Peptide
CPRCPEPKSCD

SEQ ID NO: 4167 - protein, 11 aa, synthetic construct
  REGION 1..11: note = Synthetic Peptide
PRCPEPKSCDT

SEQ ID NO: 4168 - protein, 11 aa, synthetic construct
  REGION 1..11: note = Synthetic Peptide
RCPEPKSCDTP

SEQ ID NO: 4169 - protein, 11 aa, synthetic construct
  REGION 1..11: note = Synthetic Peptide
CPEPKSCDTPP

SEQ ID NO: 4170 - protein, 11 aa, synthetic construct
  REGION 1..11: note = Synthetic Peptide
PEPKSCDTPPP

SEQ ID NO: 4171 - protein, 11 aa, synthetic construct
  REGION 1..11: note = Synthetic Peptide
EPKSCDTPPPC

SEQ ID NO: 4172 - protein, 11 aa, synthetic construct
  REGION 1..11: note = Synthetic Peptide
PKSCDTPPPCP

SEQ ID NO: 4173 - protein, 11 aa, synthetic construct
  REGION 1..11: note = Synthetic Peptide
KSCDTPPPCPR

SEQ ID NO: 4174 - protein, 11 aa, synthetic construct
  REGION 1..11: note = Synthetic Peptide
SCDTPPPCPRC

SEQ ID NO: 4175 - protein, 11 aa, synthetic construct
  REGION 1..11: note = Synthetic Peptide
CDTPPPCPRCP

SEQ ID NO: 4176 - protein, 11 aa, synthetic construct
  REGION 1..11: note = Synthetic Peptide
DTPPPCPRCPE

SEQ ID NO: 4177 - protein, 11 aa, synthetic construct
  REGION 1..11: note = Synthetic Peptide
TPPPCPRCPEP

SEQ ID NO: 4178 - protein, 11 aa, synthetic construct
  REGION 1..11: note = Synthetic Peptide
PPPCPRCPEPK

SEQ ID NO: 4179 - protein, 11 aa, synthetic construct
  REGION 1..11: note = Synthetic Peptide
PPCPRCPEPKS

SEQ ID NO: 4180 - protein, 11 aa, synthetic construct
  REGION 1..11: note = Synthetic Peptide
PCPRCPEPKSC

SEQ ID NO: 4181 - protein, 11 aa, synthetic construct
  REGION 1..11: note = Synthetic Peptide
CPRCPEPKSCD

SEQ ID NO: 4182 - protein, 11 aa, synthetic construct
  REGION 1..11: note = Synthetic Peptide
PRCPEPKSCDT

SEQ ID NO: 4183 - protein, 11 aa, synthetic construct
  REGION 1..11: note = Synthetic Peptide
RCPEPKSCDTP

SEQ ID NO: 4184 - protein, 11 aa, synthetic construct
  REGION 1..11: note = Synthetic Peptide
CPEPKSCDTPP

SEQ ID NO: 4185 - protein, 11 aa, synthetic construct
  REGION 1..11: note = Synthetic Peptide
PEPKSCDTPPP

SEQ ID NO: 4186 - protein, 11 aa, synthetic construct
  REGION 1..11: note = Synthetic Peptide
EPKSCDTPPPC

SEQ ID NO: 4187 - protein, 11 aa, synthetic construct
  REGION 1..11: note = Synthetic Peptide
PKSCDTPPPCP

SEQ ID NO: 4188 - protein, 11 aa, synthetic construct
  REGION 1..11: note = Synthetic Peptide
KSCDTPPPCPR

SEQ ID NO: 4189 - protein, 11 aa, synthetic construct
  REGION 1..11: note = Synthetic Peptide
SCDTPPPCPRC

SEQ ID NO: 4190 - protein, 11 aa, synthetic construct
  REGION 1..11: note = Synthetic Peptide
CDTPPPCPRCP

SEQ ID NO: 4191 - protein, 10 aa, synthetic construct
  REGION 1..10: note = Synthetic Peptide
ELKTPLGDTT

SEQ ID NO: 4192 - protein, 10 aa, synthetic construct
  REGION 1..10: note = Synthetic Peptide
LKTPLGDTTH

SEQ ID NO: 4193 - protein, 10 aa, synthetic construct
  REGION 1..10: note = Synthetic Peptide
KTPLGDTTHT

SEQ ID NO: 4194 - protein, 10 aa, synthetic construct
  REGION 1..10: note = Synthetic Peptide
TPLGDTTHTC

SEQ ID NO: 4195 - protein, 10 aa, synthetic construct
  REGION 1..10: note = Synthetic Peptide
PLGDTTHTCP

SEQ ID NO: 4196 - protein, 10 aa, synthetic construct
  REGION 1..10: note = Synthetic Peptide
LGDTTHTCPR

SEQ ID NO: 4197 - protein, 10 aa, synthetic construct
  REGION 1..10: note = Synthetic Peptide
GDTTHTCPRC

SEQ ID NO: 4198 - protein, 10 aa, synthetic construct
  REGION 1..10: note = Synthetic Peptide
DTTHTCPRCP

SEQ ID NO: 4199 - protein, 10 aa, synthetic construct
  REGION 1..10: note = Synthetic Peptide
TTHTCPRCPE

SEQ ID NO: 4200 - protein, 10 aa, synthetic construct
  REGION 1..10: note = Synthetic Peptide
THTCPRCPEP

SEQ ID NO: 4201 - protein, 10 aa, synthetic construct
  REGION 1..10: note = Synthetic Peptide
HTCPRCPEPK

SEQ ID NO: 4202 - protein, 10 aa, synthetic construct
  REGION 1..10: note = Synthetic Peptide
TCPRCPEPKS

SEQ ID NO: 4203 - protein, 10 aa, synthetic construct
  REGION 1..10: note = Synthetic Peptide
CPRCPEPKSC

SEQ ID NO: 4204 - protein, 10 aa, synthetic construct
  REGION 1..10: note = Synthetic Peptide
PRCPEPKSCD

SEQ ID NO: 4205 - protein, 10 aa, synthetic construct
  REGION 1..10: note = Synthetic Peptide
RCPEPKSCDT

SEQ ID NO: 4206 - protein, 10 aa, synthetic construct
  REGION 1..10: note = Synthetic Peptide
CPEPKSCDTP

SEQ ID NO: 4207 - protein, 10 aa, synthetic construct
  REGION 1..10: note = Synthetic Peptide
PEPKSCDTPP

SEQ ID NO: 4208 - protein, 10 aa, synthetic construct
  REGION 1..10: note = Synthetic Peptide
EPKSCDTPPP

SEQ ID NO: 4209 - protein, 10 aa, synthetic construct
  REGION 1..10: note = Synthetic Peptide
PKSCDTPPPC

SEQ ID NO: 4210 - protein, 10 aa, synthetic construct
  REGION 1..10: note = Synthetic Peptide
KSCDTPPPCP

SEQ ID NO: 4211 - protein, 10 aa, synthetic construct
  REGION 1..10: note = Synthetic Peptide
SCDTPPPCPR

SEQ ID NO: 4212 - protein, 10 aa, synthetic construct
  REGION 1..10: note = Synthetic Peptide
CDTPPPCPRC

SEQ ID NO: 4213 - protein, 10 aa, synthetic construct
  REGION 1..10: note = Synthetic Peptide
DTPPPCPRCP

SEQ ID NO: 4214 - protein, 10 aa, synthetic construct
  REGION 1..10: note = Synthetic Peptide
TPPPCPRCPE

SEQ ID NO: 4215 - protein, 10 aa, synthetic construct
  REGION 1..10: note = Synthetic Peptide
PPPCPRCPEP

SEQ ID NO: 4216 - protein, 10 aa, synthetic construct
  REGION 1..10: note = Synthetic Peptide
PPCPRCPEPK

SEQ ID NO: 4217 - protein, 10 aa, synthetic construct
  REGION 1..10: note = Synthetic Peptide
PCPRCPEPKS

SEQ ID NO: 4218 - protein, 10 aa, synthetic construct
  REGION 1..10: note = Synthetic Peptide
CPRCPEPKSC

SEQ ID NO: 4219 - protein, 10 aa, synthetic construct
  REGION 1..10: note = Synthetic Peptide
PRCPEPKSCD

SEQ ID NO: 4220 - protein, 10 aa, synthetic construct
  REGION 1..10: note = Synthetic Peptide
RCPEPKSCDT

SEQ ID NO: 4221 - protein, 10 aa, synthetic construct
  REGION 1..10: note = Synthetic Peptide
CPEPKSCDTP

SEQ ID NO: 4222 - protein, 10 aa, synthetic construct
  REGION 1..10: note = Synthetic Peptide
PEPKSCDTPP

SEQ ID NO: 4223 - protein, 10 aa, synthetic construct
  REGION 1..10: note = Synthetic Peptide
EPKSCDTPPP

SEQ ID NO: 4224 - protein, 10 aa, synthetic construct
  REGION 1..10: note = Synthetic Peptide
PKSCDTPPPC

SEQ ID NO: 4225 - protein, 10 aa, synthetic construct
  REGION 1..10: note = Synthetic Peptide
KSCDTPPPCP

SEQ ID NO: 4226 - protein, 10 aa, synthetic construct
  REGION 1..10: note = Synthetic Peptide
SCDTPPPCPR

SEQ ID NO: 4227 - protein, 10 aa, synthetic construct
  REGION 1..10: note = Synthetic Peptide
CDTPPPCPRC

SEQ ID NO: 4228 - protein, 10 aa, synthetic construct
  REGION 1..10: note = Synthetic Peptide
DTPPPCPRCP

SEQ ID NO: 4229 - protein, 10 aa, synthetic construct
  REGION 1..10: note = Synthetic Peptide
TPPPCPRCPE

SEQ ID NO: 4230 - protein, 10 aa, synthetic construct
  REGION 1..10: note = Synthetic Peptide
PPPCPRCPEP

SEQ ID NO: 4231 - protein, 10 aa, synthetic construct
  REGION 1..10: note = Synthetic Peptide
PPCPRCPEPK

SEQ ID NO: 4232 - protein, 10 aa, synthetic construct
  REGION 1..10: note = Synthetic Peptide
PCPRCPEPKS

SEQ ID NO: 4233 - protein, 10 aa, synthetic construct
  REGION 1..10: note = Synthetic Peptide
CPRCPEPKSC

SEQ ID NO: 4234 - protein, 10 aa, synthetic construct
  REGION 1..10: note = Synthetic Peptide
PRCPEPKSCD

SEQ ID NO: 4235 - protein, 10 aa, synthetic construct
  REGION 1..10: note = Synthetic Peptide
RCPEPKSCDT

SEQ ID NO: 4236 - protein, 10 aa, synthetic construct
  REGION 1..10: note = Synthetic Peptide
CPEPKSCDTP

SEQ ID NO: 4237 - protein, 10 aa, synthetic construct
  REGION 1..10: note = Synthetic Peptide
PEPKSCDTPP

SEQ ID NO: 4238 - protein, 10 aa, synthetic construct
  REGION 1..10: note = Synthetic Peptide
EPKSCDTPPP

SEQ ID NO: 4239 - protein, 10 aa, synthetic construct
  REGION 1..10: note = Synthetic Peptide
PKSCDTPPPC

SEQ ID NO: 4240 - protein, 10 aa, synthetic construct
  REGION 1..10: note = Synthetic Peptide
KSCDTPPPCP

SEQ ID NO: 4241 - protein, 10 aa, synthetic construct
  REGION 1..10: note = Synthetic Peptide
SCDTPPPCPR

SEQ ID NO: 4242 - protein, 10 aa, synthetic construct
  REGION 1..10: note = Synthetic Peptide
CDTPPPCPRC

SEQ ID NO: 4243 - protein, 10 aa, synthetic construct
  REGION 1..10: note = Synthetic Peptide
DTPPPCPRCP

SEQ ID NO: 4244 - protein, 9 aa, synthetic construct
  REGION 1..9: note = Synthetic Peptide
ELKTPLGDT

SEQ ID NO: 4245 - protein, 9 aa, synthetic construct
  REGION 1..9: note = Synthetic Peptide
LKTPLGDTT

SEQ ID NO: 4246 - protein, 9 aa, synthetic construct
  REGION 1..9: note = Synthetic Peptide
KTPLGDTTH

SEQ ID NO: 4247 - protein, 9 aa, synthetic construct
  REGION 1..9: note = Synthetic Peptide
TPLGDTTHT

SEQ ID NO: 4248 - protein, 9 aa, synthetic construct
  REGION 1..9: note = Synthetic Peptide
PLGDTTHTC

SEQ ID NO: 4249 - protein, 9 aa, synthetic construct
  REGION 1..9: note = Synthetic Peptide
LGDTTHTCP

SEQ ID NO: 4250 - protein, 9 aa, synthetic construct
  REGION 1..9: note = Synthetic Peptide
GDTTHTCPR

SEQ ID NO: 4251 - protein, 9 aa, synthetic construct
  REGION 1..9: note = Synthetic Peptide
DTTHTCPRC

SEQ ID NO: 4252 - protein, 9 aa, synthetic construct
  REGION 1..9: note = Synthetic Peptide
TTHTCPRCP

SEQ ID NO: 4253 - protein, 9 aa, synthetic construct
  REGION 1..9: note = Synthetic Peptide
THTCPRCPE

SEQ ID NO: 4254 - protein, 9 aa, synthetic construct
  REGION 1..9: note = Synthetic Peptide
HTCPRCPEP

SEQ ID NO: 4255 - protein, 9 aa, synthetic construct
  REGION 1..9: note = Synthetic Peptide
TCPRCPEPK

SEQ ID NO: 4256 - protein, 9 aa, synthetic construct
  REGION 1..9: note = Synthetic Peptide
CPRCPEPKS

SEQ ID NO: 4257 - protein, 9 aa, synthetic construct
  REGION 1..9: note = Synthetic Peptide
PRCPEPKSC

SEQ ID NO: 4258 - protein, 9 aa, synthetic construct
  REGION 1..9: note = Synthetic Peptide
RCPEPKSCD

SEQ ID NO: 4259 - protein, 9 aa, synthetic construct
  REGION 1..9: note = Synthetic Peptide
CPEPKSCDT

SEQ ID NO: 4260 - protein, 9 aa, synthetic construct
  REGION 1..9: note = Synthetic Peptide
PEPKSCDTP

SEQ ID NO: 4261 - protein, 9 aa, synthetic construct
  REGION 1..9: note = Synthetic Peptide
EPKSCDTPP

SEQ ID NO: 4262 - protein, 9 aa, synthetic construct
  REGION 1..9: note = Synthetic Peptide
PKSCDTPPP

SEQ ID NO: 4263 - protein, 9 aa, synthetic construct
  REGION 1..9: note = Synthetic Peptide
KSCDTPPPC

SEQ ID NO: 4264 - protein, 9 aa, synthetic construct
  REGION 1..9: note = Synthetic Peptide
SCDTPPPCP

SEQ ID NO: 4265 - protein, 9 aa, synthetic construct
  REGION 1..9: note = Synthetic Peptide
CDTPPPCPR

SEQ ID NO: 4266 - protein, 9 aa, synthetic construct
  REGION 1..9: note = Synthetic Peptide
DTPPPCPRC

SEQ ID NO: 4267 - protein, 9 aa, synthetic construct
  REGION 1..9: note = Synthetic Peptide
TPPPCPRCP

SEQ ID NO: 4268 - protein, 9 aa, synthetic construct
  REGION 1..9: note = Synthetic Peptide
PPPCPRCPE

SEQ ID NO: 4269 - protein, 9 aa, synthetic construct
  REGION 1..9: note = Synthetic Peptide
PPCPRCPEP

SEQ ID NO: 4270 - protein, 9 aa, synthetic construct
  REGION 1..9: note = Synthetic Peptide
PCPRCPEPK

SEQ ID NO: 4271 - protein, 9 aa, synthetic construct
  REGION 1..9: note = Synthetic Peptide
CPRCPEPKS

SEQ ID NO: 4272 - protein, 9 aa, synthetic construct
  REGION 1..9: note = Synthetic Peptide
PRCPEPKSC

SEQ ID NO: 4273 - protein, 9 aa, synthetic construct
  REGION 1..9: note = Synthetic Peptide
RCPEPKSCD

SEQ ID NO: 4274 - protein, 9 aa, synthetic construct
  REGION 1..9: note = Synthetic Peptide
CPEPKSCDT

SEQ ID NO: 4275 - protein, 9 aa, synthetic construct
  REGION 1..9: note = Synthetic Peptide
PEPKSCDTP

SEQ ID NO: 4276 - protein, 9 aa, synthetic construct
  REGION 1..9: note = Synthetic Peptide
EPKSCDTPP

SEQ ID NO: 4277 - protein, 9 aa, synthetic construct
  REGION 1..9: note = Synthetic Peptide
PKSCDTPPP

SEQ ID NO: 4278 - protein, 9 aa, synthetic construct
  REGION 1..9: note = Synthetic Peptide
KSCDTPPPC

SEQ ID NO: 4279 - protein, 9 aa, synthetic construct
  REGION 1..9: note = Synthetic Peptide
SCDTPPPCP

SEQ ID NO: 4280 - protein, 9 aa, synthetic construct
  REGION 1..9: note = Synthetic Peptide
CDTPPPCPR

SEQ ID NO: 4281 - protein, 9 aa, synthetic construct
  REGION 1..9: note = Synthetic Peptide
DTPPPCPRC

SEQ ID NO: 4282 - protein, 9 aa, synthetic construct
  REGION 1..9: note = Synthetic Peptide
TPPPCPRCP

SEQ ID NO: 4283 - protein, 9 aa, synthetic construct
  REGION 1..9: note = Synthetic Peptide
PPPCPRCPE

SEQ ID NO: 4284 - protein, 9 aa, synthetic construct
  REGION 1..9: note = Synthetic Peptide
PPCPRCPEP

SEQ ID NO: 4285 - protein, 9 aa, synthetic construct
  REGION 1..9: note = Synthetic Peptide
PCPRCPEPK

SEQ ID NO: 4286 - protein, 9 aa, synthetic construct
  REGION 1..9: note = Synthetic Peptide
CPRCPEPKS

SEQ ID NO: 4287 - protein, 9 aa, synthetic construct
  REGION 1..9: note = Synthetic Peptide
PRCPEPKSC

SEQ ID NO: 4288 - protein, 9 aa, synthetic construct
  REGION 1..9: note = Synthetic Peptide
RCPEPKSCD

SEQ ID NO: 4289 - protein, 9 aa, synthetic construct
  REGION 1..9: note = Synthetic Peptide
CPEPKSCDT

SEQ ID NO: 4290 - protein, 9 aa, synthetic construct
  REGION 1..9: note = Synthetic Peptide
PEPKSCDTP

SEQ ID NO: 4291 - protein, 9 aa, synthetic construct
  REGION 1..9: note = Synthetic Peptide
EPKSCDTPP

SEQ ID NO: 4292 - protein, 9 aa, synthetic construct
  REGION 1..9: note = Synthetic Peptide
PKSCDTPPP

SEQ ID NO: 4293 - protein, 9 aa, synthetic construct
  REGION 1..9: note = Synthetic Peptide
KSCDTPPPC

SEQ ID NO: 4294 - protein, 9 aa, synthetic construct
  REGION 1..9: note = Synthetic Peptide
SCDTPPPCP

SEQ ID NO: 4295 - protein, 9 aa, synthetic construct
  REGION 1..9: note = Synthetic Peptide
CDTPPPCPR

SEQ ID NO: 4296 - protein, 9 aa, synthetic construct
  REGION 1..9: note = Synthetic Peptide
DTPPPCPRC

SEQ ID NO: 4297 - protein, 9 aa, synthetic construct
  REGION 1..9: note = Synthetic Peptide
TPPPCPRCP

SEQ ID NO: 4298 - protein, 8 aa, synthetic construct
  REGION 1..8: note = Synthetic Peptide
ELKTPLGD

SEQ ID NO: 4299 - protein, 8 aa, synthetic construct
  REGION 1..8: note = Synthetic Peptide
LKTPLGDT

SEQ ID NO: 4300 - protein, 8 aa, synthetic construct
  REGION 1..8: note = Synthetic Peptide
KTPLGDTT

SEQ ID NO: 4301 - protein, 8 aa, synthetic construct
  REGION 1..8: note = Synthetic Peptide
TPLGDTTH

SEQ ID NO: 4302 - protein, 8 aa, synthetic construct
  REGION 1..8: note = Synthetic Peptide
PLGDTTHT

SEQ ID NO: 4303 - protein, 8 aa, synthetic construct
  REGION 1..8: note = Synthetic Peptide
LGDTTHTC

SEQ ID NO: 4304 - protein, 8 aa, synthetic construct
  REGION 1..8: note = Synthetic Peptide
GDTTHTCP

SEQ ID NO: 4305 - protein, 8 aa, synthetic construct
  REGION 1..8: note = Synthetic Peptide
DTTHTCPR

SEQ ID NO: 4306 - protein, 8 aa, synthetic construct
  REGION 1..8: note = Synthetic Peptide
TTHTCPRC

SEQ ID NO: 4307 - protein, 8 aa, synthetic construct
  REGION 1..8: note = Synthetic Peptide
THTCPRCP

SEQ ID NO: 4308 - protein, 8 aa, synthetic construct
  REGION 1..8: note = Synthetic Peptide
HTCPRCPE

SEQ ID NO: 4309 - protein, 8 aa, synthetic construct
  REGION 1..8: note = Synthetic Peptide
TCPRCPEP

SEQ ID NO: 4310 - protein, 8 aa, synthetic construct
  REGION 1..8: note = Synthetic Peptide
CPRCPEPK

SEQ ID NO: 4311 - protein, 8 aa, synthetic construct
  REGION 1..8: note = Synthetic Peptide
PRCPEPKS

SEQ ID NO: 4312 - protein, 8 aa, synthetic construct
  REGION 1..8: note = Synthetic Peptide
RCPEPKSC

SEQ ID NO: 4313 - protein, 8 aa, synthetic construct
  REGION 1..8: note = Synthetic Peptide
CPEPKSCD

SEQ ID NO: 4314 - protein, 8 aa, synthetic construct
  REGION 1..8: note = Synthetic Peptide
PEPKSCDT

SEQ ID NO: 4315 - protein, 8 aa, synthetic construct
  REGION 1..8: note = Synthetic Peptide
EPKSCDTP

SEQ ID NO: 4316 - protein, 8 aa, synthetic construct
  REGION 1..8: note = Synthetic Peptide
PKSCDTPP

SEQ ID NO: 4317 - protein, 8 aa, synthetic construct
  REGION 1..8: note = Synthetic Peptide
KSCDTPPP

SEQ ID NO: 4318 - protein, 8 aa, synthetic construct
  REGION 1..8: note = Synthetic Peptide
SCDTPPPC

SEQ ID NO: 4319 - protein, 8 aa, synthetic construct
  REGION 1..8: note = Synthetic Peptide
CDTPPPCP

SEQ ID NO: 4320 - protein, 8 aa, synthetic construct
  REGION 1..8: note = Synthetic Peptide
DTPPPCPR

SEQ ID NO: 4321 - protein, 8 aa, synthetic construct
  REGION 1..8: note = Synthetic Peptide
TPPPCPRC

SEQ ID NO: 4322 - protein, 8 aa, synthetic construct
  REGION 1..8: note = Synthetic Peptide
PPPCPRCP

SEQ ID NO: 4323 - protein, 8 aa, synthetic construct
  REGION 1..8: note = Synthetic Peptide
PPCPRCPE

SEQ ID NO: 4324 - protein, 8 aa, synthetic construct
  REGION 1..8: note = Synthetic Peptide
PCPRCPEP

SEQ ID NO: 4325 - protein, 8 aa, synthetic construct
  REGION 1..8: note = Synthetic Peptide
CPRCPEPK

SEQ ID NO: 4326 - protein, 8 aa, synthetic construct
  REGION 1..8: note = Synthetic Peptide
PRCPEPKS

SEQ ID NO: 4327 - protein, 8 aa, synthetic construct
  REGION 1..8: note = Synthetic Peptide
RCPEPKSC

SEQ ID NO: 4328 - protein, 8 aa, synthetic construct
  REGION 1..8: note = Synthetic Peptide
CPEPKSCD

SEQ ID NO: 4329 - protein, 8 aa, synthetic construct
  REGION 1..8: note = Synthetic Peptide
PEPKSCDT

SEQ ID NO: 4330 - protein, 8 aa, synthetic construct
  REGION 1..8: note = Synthetic Peptide
EPKSCDTP

SEQ ID NO: 4331 - protein, 8 aa, synthetic construct
  REGION 1..8: note = Synthetic Peptide
PKSCDTPP

SEQ ID NO: 4332 - protein, 8 aa, synthetic construct
  REGION 1..8: note = Synthetic Peptide
KSCDTPPP

SEQ ID NO: 4333 - protein, 8 aa, synthetic construct
  REGION 1..8: note = Synthetic Peptide
SCDTPPPC

SEQ ID NO: 4334 - protein, 8 aa, synthetic construct
  REGION 1..8: note = Synthetic Peptide
CDTPPPCP

SEQ ID NO: 4335 - protein, 8 aa, synthetic construct
  REGION 1..8: note = Synthetic Peptide
DTPPPCPR

SEQ ID NO: 4336 - protein, 8 aa, synthetic construct
  REGION 1..8: note = Synthetic Peptide
TPPPCPRC

SEQ ID NO: 4337 - protein, 8 aa, synthetic construct
  REGION 1..8: note = Synthetic Peptide
PPPCPRCP

SEQ ID NO: 4338 - protein, 8 aa, synthetic construct
  REGION 1..8: note = Synthetic Peptide
PPCPRCPE

SEQ ID NO: 4339 - protein, 8 aa, synthetic construct
  REGION 1..8: note = Synthetic Peptide
PCPRCPEP

SEQ ID NO: 4340 - protein, 8 aa, synthetic construct
  REGION 1..8: note = Synthetic Peptide
CPRCPEPK

SEQ ID NO: 4341 - protein, 8 aa, synthetic construct
  REGION 1..8: note = Synthetic Peptide
PRCPEPKS

SEQ ID NO: 4342 - protein, 8 aa, synthetic construct
  REGION 1..8: note = Synthetic Peptide
RCPEPKSC

SEQ ID NO: 4343 - protein, 8 aa, synthetic construct
  REGION 1..8: note = Synthetic Peptide
CPEPKSCD

SEQ ID NO: 4344 - protein, 8 aa, synthetic construct
  REGION 1..8: note = Synthetic Peptide
PEPKSCDT

SEQ ID NO: 4345 - protein, 8 aa, synthetic construct
  REGION 1..8: note = Synthetic Peptide
EPKSCDTP

SEQ ID NO: 4346 - protein, 8 aa, synthetic construct
  REGION 1..8: note = Synthetic Peptide
PKSCDTPP

SEQ ID NO: 4347 - protein, 8 aa, synthetic construct
  REGION 1..8: note = Synthetic Peptide
KSCDTPPP

SEQ ID NO: 4348 - protein, 8 aa, synthetic construct
  REGION 1..8: note = Synthetic Peptide
SCDTPPPC

SEQ ID NO: 4349 - protein, 8 aa, synthetic construct
  REGION 1..8: note = Synthetic Peptide
CDTPPPCP

SEQ ID NO: 4350 - protein, 8 aa, synthetic construct
  REGION 1..8: note = Synthetic Peptide
DTPPPCPR

SEQ ID NO: 4351 - protein, 8 aa, synthetic construct
  REGION 1..8: note = Synthetic Peptide
TPPPCPRC

SEQ ID NO: 4352 - protein, 8 aa, synthetic construct
  REGION 1..8: note = Synthetic Peptide
PPPCPRCP

SEQ ID NO: 4353 - protein, 12 aa, synthetic construct
  REGION 1..12: note = Synthetic Peptide
ESKYGPPCPSCP

SEQ ID NO: 4354 - protein, 11 aa, synthetic construct
  REGION 1..11: note = Synthetic Peptide
ESKYGPPCPSC

SEQ ID NO: 4355 - protein, 11 aa, synthetic construct
  REGION 1..11: note = Synthetic Peptide
SKYGPPCPSCP

SEQ ID NO: 4356 - protein, 10 aa, synthetic construct
  REGION 1..10: note = Synthetic Peptide
ESKYGPPCPS

SEQ ID NO: 4357 - protein, 10 aa, synthetic construct
  REGION 1..10: note = Synthetic Peptide
SKYGPPCPSC

SEQ ID NO: 4358 - protein, 10 aa, synthetic construct
  REGION 1..10: note = Synthetic Peptide
KYGPPCPSCP

SEQ ID NO: 4359 - protein, 9 aa, synthetic construct
  REGION 1..9: note = Synthetic Peptide
ESKYGPPCP

SEQ ID NO: 4360 - protein, 9 aa, synthetic construct
  REGION 1..9: note = Synthetic Peptide
SKYGPPCPS

SEQ ID NO: 4361 - protein, 9 aa, synthetic construct
  REGION 1..9: note = Synthetic Peptide
KYGPPCPSC

SEQ ID NO: 4362 - protein, 9 aa, synthetic construct
  REGION 1..9: note = Synthetic Peptide
YGPPCPSCP

SEQ ID NO: 4363 - protein, 8 aa, synthetic construct
  REGION 1..8: note = Synthetic Peptide
ESKYGPPC

SEQ ID NO: 4364 - protein, 8 aa, synthetic construct
  REGION 1..8: note = Synthetic Peptide
SKYGPPCP

SEQ ID NO: 4365 - protein, 8 aa, synthetic construct
  REGION 1..8: note = Synthetic Peptide
KYGPPCPS

SEQ ID NO: 4366 - protein, 8 aa, synthetic construct
  REGION 1..8: note = Synthetic Peptide
YGPPCPSC

SEQ ID NO: 4367 - protein, 8 aa, synthetic construct
  REGION 1..8: note = Synthetic Peptide
GPPCPSCP

SEQ ID NO: 4368 - protein, 7 aa, synthetic construct
  REGION 1..7: note = Synthetic Peptide
ESKYGPP

SEQ ID NO: 4369 - protein, 7 aa, synthetic construct
  REGION 1..7: note = Synthetic Peptide
SKYGPPC

SEQ ID NO: 4370 - protein, 7 aa, synthetic construct
  REGION 1..7: note = Synthetic Peptide
KYGPPCP

SEQ ID NO: 4371 - protein, 7 aa, synthetic construct
  REGION 1..7: note = Synthetic Peptide
YGPPCPS

SEQ ID NO: 4372 - protein, 7 aa, synthetic construct
  REGION 1..7: note = Synthetic Peptide
GPPCPSC

SEQ ID NO: 4373 - protein, 7 aa, synthetic construct
  REGION 1..7: note = Synthetic Peptide
PPCPSCP

SEQ ID NO: 4374 - protein, 19 aa, synthetic construct
  REGION 1..19: note = Synthetic Peptide
WVDNKTFSVCSRDFTPPTV

SEQ ID NO: 4375 - protein, 18 aa, synthetic construct
  REGION 1..18: note = Synthetic Peptide
WVDNKTFSVCSRDFTPPT

SEQ ID NO: 4376 - protein, 18 aa, synthetic construct
  REGION 1..18: note = Synthetic Peptide
VDNKTFSVCSRDFTPPTV

SEQ ID NO: 4377 - protein, 17 aa, synthetic construct
  REGION 1..17: note = Synthetic Peptide
WVDNKTFSVCSRDFTPP

SEQ ID NO: 4378 - protein, 17 aa, synthetic construct
  REGION 1..17: note = Synthetic Peptide
VDNKTFSVCSRDFTPPT

SEQ ID NO: 4379 - protein, 17 aa, synthetic construct
  REGION 1..17: note = Synthetic Peptide
DNKTFSVCSRDFTPPTV

SEQ ID NO: 4380 - protein, 16 aa, synthetic construct
  REGION 1..16: note = Synthetic Peptide
WVDNKTFSVCSRDFTP

SEQ ID NO: 4381 - protein, 16 aa, synthetic construct
  REGION 1..16: note = Synthetic Peptide
VDNKTFSVCSRDFTPP

SEQ ID NO: 4382 - protein, 16 aa, synthetic construct
  REGION 1..16: note = Synthetic Peptide
DNKTFSVCSRDFTPPT

SEQ ID NO: 4383 - protein, 16 aa, synthetic construct
  REGION 1..16: note = Synthetic Peptide
NKTFSVCSRDFTPPTV

SEQ ID NO: 4384 - protein, 15 aa, synthetic construct
  REGION 1..15: note = Synthetic Peptide
WVDNKTFSVCSRDFT

SEQ ID NO: 4385 - protein, 15 aa, synthetic construct
  REGION 1..15: note = Synthetic Peptide
VDNKTFSVCSRDFTP

SEQ ID NO: 4386 - protein, 15 aa, synthetic construct
  REGION 1..15: note = Synthetic Peptide
DNKTFSVCSRDFTPP

SEQ ID NO: 4387 - protein, 15 aa, synthetic construct
  REGION 1..15: note = Synthetic Peptide
NKTFSVCSRDFTPPT

SEQ ID NO: 4388 - protein, 15 aa, synthetic construct
  REGION 1..15: note = Synthetic Peptide
KTFSVCSRDFTPPTV

SEQ ID NO: 4389 - protein, 14 aa, synthetic construct
  REGION 1..14: note = Synthetic Peptide
WVDNKTFSVCSRDF

SEQ ID NO: 4390 - protein, 14 aa, synthetic construct
  REGION 1..14: note = Synthetic Peptide
VDNKTFSVCSRDFT

SEQ ID NO: 4391 - protein, 14 aa, synthetic construct
  REGION 1..14: note = Synthetic Peptide
DNKTFSVCSRDFTP

SEQ ID NO: 4392 - protein, 14 aa, synthetic construct
  REGION 1..14: note = Synthetic Peptide
NKTFSVCSRDFTPP

SEQ ID NO: 4393 - protein, 14 aa, synthetic construct
  REGION 1..14: note = Synthetic Peptide
KTFSVCSRDFTPPT

SEQ ID NO: 4394 - protein, 14 aa, synthetic construct
  REGION 1..14: note = Synthetic Peptide
TFSVCSRDFTPPTV

SEQ ID NO: 4395 - protein, 13 aa, synthetic construct
  REGION 1..13: note = Synthetic Peptide
WVDNKTFSVCSRD

SEQ ID NO: 4396 - protein, 13 aa, synthetic construct
  REGION 1..13: note = Synthetic Peptide
VDNKTFSVCSRDF

SEQ ID NO: 4397 - protein, 13 aa, synthetic construct
  REGION 1..13: note = Synthetic Peptide
DNKTFSVCSRDFT

SEQ ID NO: 4398 - protein, 13 aa, synthetic construct
  REGION 1..13: note = Synthetic Peptide
NKTFSVCSRDFTP

SEQ ID NO: 4399 - protein, 13 aa, synthetic construct
  REGION 1..13: note = Synthetic Peptide
KTFSVCSRDFTPP

SEQ ID NO: 4400 - protein, 13 aa, synthetic construct
  REGION 1..13: note = Synthetic Peptide
TFSVCSRDFTPPT

SEQ ID NO: 4401 - protein, 13 aa, synthetic construct
  REGION 1..13: note = Synthetic Peptide
FSVCSRDFTPPTV

SEQ ID NO: 4402 - protein, 12 aa, synthetic construct
  REGION 1..12: note = Synthetic Peptide
WVDNKTFSVCSR

SEQ ID NO: 4403 - protein, 12 aa, synthetic construct
  REGION 1..12: note = Synthetic Peptide
VDNKTFSVCSRD

SEQ ID NO: 4404 - protein, 12 aa, synthetic construct
  REGION 1..12: note = Synthetic Peptide
DNKTFSVCSRDF

SEQ ID NO: 4405 - protein, 12 aa, synthetic construct
  REGION 1..12: note = Synthetic Peptide
NKTFSVCSRDFT

SEQ ID NO: 4406 - protein, 12 aa, synthetic construct
  REGION 1..12: note = Synthetic Peptide
KTFSVCSRDFTP

SEQ ID NO: 4407 - protein, 12 aa, synthetic construct
  REGION 1..12: note = Synthetic Peptide
TFSVCSRDFTPP

SEQ ID NO: 4408 - protein, 12 aa, synthetic construct
  REGION 1..12: note = Synthetic Peptide
FSVCSRDFTPPT

SEQ ID NO: 4409 - protein, 12 aa, synthetic construct
  REGION 1..12: note = Synthetic Peptide
SVCSRDFTPPTV

SEQ ID NO: 4410 - protein, 11 aa, synthetic construct
  REGION 1..11: note = Synthetic Peptide
WVDNKTFSVCS

SEQ ID NO: 4411 - protein, 11 aa, synthetic construct
  REGION 1..11: note = Synthetic Peptide
VDNKTFSVCSR

SEQ ID NO: 4412 - protein, 11 aa, synthetic construct
  REGION 1..11: note = Synthetic Peptide
DNKTFSVCSRD

SEQ ID NO: 4413 - protein, 11 aa, synthetic construct
  REGION 1..11: note = Synthetic Peptide
NKTFSVCSRDF

SEQ ID NO: 4414 - protein, 11 aa, synthetic construct
  REGION 1..11: note = Synthetic Peptide
KTFSVCSRDFT

SEQ ID NO: 4415 - protein, 11 aa, synthetic construct
  REGION 1..11: note = Synthetic Peptide
TFSVCSRDFTP

SEQ ID NO: 4416 - protein, 11 aa, synthetic construct
  REGION 1..11: note = Synthetic Peptide
FSVCSRDFTPP

SEQ ID NO: 4417 - protein, 11 aa, synthetic construct
  REGION 1..11: note = Synthetic Peptide
SVCSRDFTPPT

SEQ ID NO: 4418 - protein, 11 aa, synthetic construct
  REGION 1..11: note = Synthetic Peptide
VCSRDFTPPTV

SEQ ID NO: 4419 - protein, 10 aa, synthetic construct
  REGION 1..10: note = Synthetic Peptide
WVDNKTFSVC

SEQ ID NO: 4420 - protein, 10 aa, synthetic construct
  REGION 1..10: note = Synthetic Peptide
VDNKTFSVCS

SEQ ID NO: 4421 - protein, 10 aa, synthetic construct
  REGION 1..10: note = Synthetic Peptide
DNKTFSVCSR

SEQ ID NO: 4422 - protein, 10 aa, synthetic construct
  REGION 1..10: note = Synthetic Peptide
NKTFSVCSRD

SEQ ID NO: 4423 - protein, 10 aa, synthetic construct
  REGION 1..10: note = Synthetic Peptide
KTFSVCSRDF

SEQ ID NO: 4424 - protein, 10 aa, synthetic construct
  REGION 1..10: note = Synthetic Peptide
TFSVCSRDFT

SEQ ID NO: 4425 - protein, 10 aa, synthetic construct
  REGION 1..10: note = Synthetic Peptide
FSVCSRDFTP

SEQ ID NO: 4426 - protein, 10 aa, synthetic construct
  REGION 1..10: note = Synthetic Peptide
SVCSRDFTPP

SEQ ID NO: 4427 - protein, 10 aa, synthetic construct
  REGION 1..10: note = Synthetic Peptide
VCSRDFTPPT

SEQ ID NO: 4428 - protein, 10 aa, synthetic construct
  REGION 1..10: note = Synthetic Peptide
CSRDFTPPTV

SEQ ID NO: 4429 - protein, 9 aa, synthetic construct
  REGION 1..9: note = Synthetic Peptide
WVDNKTFSV

SEQ ID NO: 4430 - protein, 9 aa, synthetic construct
  REGION 1..9: note = Synthetic Peptide
VDNKTFSVC

SEQ ID NO: 4431 - protein, 9 aa, synthetic construct
  REGION 1..9: note = Synthetic Peptide
DNKTFSVCS

SEQ ID NO: 4432 - protein, 9 aa, synthetic construct
  REGION 1..9: note = Synthetic Peptide
NKTFSVCSR

SEQ ID NO: 4433 - protein, 9 aa, synthetic construct
  REGION 1..9: note = Synthetic Peptide
KTFSVCSRD

SEQ ID NO: 4434 - protein, 9 aa, synthetic construct
  REGION 1..9: note = Synthetic Peptide
TFSVCSRDF

SEQ ID NO: 4435 - protein, 9 aa, synthetic construct
  REGION 1..9: note = Synthetic Peptide
FSVCSRDFT

SEQ ID NO: 4436 - protein, 9 aa, synthetic construct
  REGION 1..9: note = Synthetic Peptide
SVCSRDFTP

SEQ ID NO: 4437 - protein, 9 aa, synthetic construct
  REGION 1..9: note = Synthetic Peptide
VCSRDFTPP

SEQ ID NO: 4438 - protein, 9 aa, synthetic construct
  REGION 1..9: note = Synthetic Peptide
CSRDFTPPT

SEQ ID NO: 4439 - protein, 9 aa, synthetic construct
  REGION 1..9: note = Synthetic Peptide
SRDFTPPTV

SEQ ID NO: 4440 - protein, 8 aa, synthetic construct
  REGION 1..8: note = Synthetic Peptide
WVDNKTFS

SEQ ID NO: 4441 - protein, 8 aa, synthetic construct
  REGION 1..8: note = Synthetic Peptide
VDNKTFSV

SEQ ID NO: 4442 - protein, 8 aa, synthetic construct
  REGION 1..8: note = Synthetic Peptide
DNKTFSVC

SEQ ID NO: 4443 - protein, 8 aa, synthetic construct
  REGION 1..8: note = Synthetic Peptide
NKTFSVCS

SEQ ID NO: 4444 - protein, 8 aa, synthetic construct
  REGION 1..8: note = Synthetic Peptide
KTFSVCSR

SEQ ID NO: 4445 - protein, 8 aa, synthetic construct
  REGION 1..8: note = Synthetic Peptide
TFSVCSRD

SEQ ID NO: 4446 - protein, 8 aa, synthetic construct
  REGION 1..8: note = Synthetic Peptide
FSVCSRDF

SEQ ID NO: 4447 - protein, 8 aa, synthetic construct
  REGION 1..8: note = Synthetic Peptide
SVCSRDFT

SEQ ID NO: 4448 - protein, 8 aa, synthetic construct
  REGION 1..8: note = Synthetic Peptide
VCSRDFTP

SEQ ID NO: 4449 - protein, 8 aa, synthetic construct
  REGION 1..8: note = Synthetic Peptide
CSRDFTPP

SEQ ID NO: 4450 - protein, 8 aa, synthetic construct
  REGION 1..8: note = Synthetic Peptide
SRDFTPPT

SEQ ID NO: 4451 - protein, 8 aa, synthetic construct
  REGION 1..8: note = Synthetic Peptide
RDFTPPTV

SEQ ID NO: 4452 - protein, 7 aa, synthetic construct
  REGION 1..7: note = Synthetic Peptide
WVDNKTF

SEQ ID NO: 4453 - protein, 7 aa, synthetic construct
  REGION 1..7: note = Synthetic Peptide
VDNKTFS

SEQ ID NO: 4454 - protein, 7 aa, synthetic construct
  REGION 1..7: note = Synthetic Peptide
DNKTFSV

SEQ ID NO: 4455 - protein, 7 aa, synthetic construct
  REGION 1..7: note = Synthetic Peptide
NKTFSVC

SEQ ID NO: 4456 - protein, 7 aa, synthetic construct
  REGION 1..7: note = Synthetic Peptide
KTFSVCS

SEQ ID NO: 4457 - protein, 7 aa, synthetic construct
  REGION 1..7: note = Synthetic Peptide
TFSVCSR

SEQ ID NO: 4458 - protein, 7 aa, synthetic construct
  REGION 1..7: note = Synthetic Peptide
FSVCSRD

SEQ ID NO: 4459 - protein, 7 aa, synthetic construct
  REGION 1..7: note = Synthetic Peptide
SVCSRDF

SEQ ID NO: 4460 - protein, 7 aa, synthetic construct
  REGION 1..7: note = Synthetic Peptide
VCSRDFT

SEQ ID NO: 4461 - protein, 7 aa, synthetic construct
  REGION 1..7: note = Synthetic Peptide
CSRDFTP

SEQ ID NO: 4462 - protein, 7 aa, synthetic construct
  REGION 1..7: note = Synthetic Peptide
SRDFTPP

SEQ ID NO: 4463 - protein, 7 aa, synthetic construct
  REGION 1..7: note = Synthetic Peptide
RDFTPPT

SEQ ID NO: 4464 - protein, 7 aa, synthetic construct
  REGION 1..7: note = Synthetic Peptide
DFTPPTV

SEQ ID NO: 4465 - protein, 26 aa, synthetic construct
  REGION 1..26: note = Synthetic Peptide
PLPVIAELPPKVSVFVPPRDGFFGNP

SEQ ID NO: 4466 - protein, 17 aa, synthetic construct
  REGION 1..17: note = Synthetic Peptide
ELKTPLGDTTHTCPRCP

SEQ ID NO: 4467 - protein, 32 aa, synthetic construct; identical to SEQ ID NO: 3278
  REGION 1..32: note = Synthetic Peptide

SEQ ID NO: 4468 - protein, 47 aa, synthetic construct; identical to SEQ ID NO: 2933
  REGION 1..47: note = Synthetic Peptide

SEQ ID NO: 4469 - protein, 62 aa, synthetic construct; identical to SEQ ID NO: 2813
  REGION 1..62: note = Synthetic Peptide

SEQ ID NO: 4470 - protein, 77 aa, synthetic construct
  REGION 1..77: note = Synthetic Peptide
ELKTPLGDTTHTCPRCPEPKSCDTPPPCPRCPEPKSCDTPPPCPRCPEPKSCDTPPPCPRCPEPKSCDTPPPCPRCP

SEQ ID NO: 4471 - protein, 92 aa, synthetic construct
  REGION 1..92: note = Synthetic Peptide
ELKTPLGDTTHTCPRCPEPKSCDTPPPCPRCPEPKSCDTPPPCPRCPEPKSCDTPPPCPRCPEPKSCDTPPPCPRCPEPKSCDTPPPCPRCP

SEQ ID NO: 4472 - protein, 34 aa, synthetic construct
  REGION 1..34: note = Synthetic Peptide
ELKTPLGDTTHTCPRCPELKTPLGDTTHTCPRCP

SEQ ID NO: 4473 - protein, 51 aa, synthetic construct
  REGION 1..51: note = Synthetic Peptide
ELKTPLGDTTHTCPRCPELKTPLGDTTHTCPRCPELKTPLGDTTHTCPRCP

SEQ ID NO: 4474 - protein, 68 aa, synthetic construct
  REGION 1..68: note = Synthetic Peptide
ELKTPLGDTTHTCPRCPELKTPLGDTTHTCPRCPELKTPLGDTTHTCPRCPELKTPLGDTTHTCPRCP

SEQ ID NO: 4475 - protein, 85 aa, synthetic construct
  REGION 1..85: note = Synthetic Peptide
ELKTPLGDTTHTCPRCPELKTPLGDTTHTCPRCPELKTPLGDTTHTCPRCPELKTPLGDTTHTCPRCPELKTPLGDTTHTCPRCP

SEQ ID NO: 4476 - protein, 102 aa, synthetic construct
  REGION 1..102: note = Synthetic Peptide
ELKTPLGDTTHTCPRCPELKTPLGDTTHTCPRCPELKTPLGDTTHTCPRCPELKTPLGDTTHTCPRCPELKTPLGDTTHTCPRCPELKTPLGDTTHTCPRCP

SEQ ID NO: 4477 - protein, 15 aa, synthetic construct
  REGION 1..15: note = Synthetic Peptide
EPKSCDTPPPCPRCP

SEQ ID NO: 4478 - protein, 30 aa, synthetic construct; identical to SEQ ID NO: 3358
  REGION 1..30: note = Synthetic Peptide

SEQ ID NO: 4479 - protein, 45 aa, synthetic construct; identical to SEQ ID NO: 2983
  REGION 1..45: note = Synthetic Peptide

SEQ ID NO: 4480 - protein, 60 aa, synthetic construct
  REGION 1..60: note = Synthetic Peptide
EPKSCDTPPPCPRCPEPKSCDTPPPCPRCPEPKSCDTPPPCPRCPEPKSCDTPPPCPRCP

SEQ ID NO: 4481 - protein, 75 aa, synthetic construct
  REGION 1..75: note = Synthetic Peptide
EPKSCDTPPPCPRCPEPKSCDTPPPCPRCPEPKSCDTPPPCPRCPEPKSCDTPPPCPRCPEPKSCDTPPPCPRCP

SEQ ID NO: 4482 - protein, 90 aa, synthetic construct
  REGION 1..90: note = Synthetic Peptide
EPKSCDTPPPCPRCPEPKSCDTPPPCPRCPEPKSCDTPPPCPRCPEPKSCDTPPPCPRCPEPKSCDTPPPCPRCPEPKSCDTPPPCPRCP

SEQ ID NO: 4483 - protein, 32 aa, synthetic construct
  REGION 1..32: note = Synthetic Peptide
EPKSCDTPPPCPRCPELKTPLGDTTHTCPRCP

SEQ ID NO: 4484 - protein, 49 aa, synthetic construct
  REGION 1..49: note = Synthetic Peptide
EPKSCDTPPPCPRCPELKTPLGDTTHTCPRCPELKTPLGDTTHTCPRCP

SEQ ID NO: 4485 - protein, 66 aa, synthetic construct
  REGION 1..66: note = Synthetic Peptide
EPKSCDTPPPCPRCPELKTPLGDTTHTCPRCPELKTPLGDTTHTCPRCPELKTPLGDTTHTCPRCP

SEQ ID NO: 4486 - protein, 83 aa, synthetic construct
  REGION 1..83: note = Synthetic Peptide
EPKSCDTPPPCPRCPELKTPLGDTTHTCPRCPELKTPLGDTTHTCPRCPELKTPLGDTTHTCPRCPELKTPLGDTTHTCPRCP

SEQ ID NO: 4487 - protein, 100 aa, synthetic construct
  REGION 1..100: note = Synthetic Peptide
EPKSCDTPPPCPRCPELKTPLGDTTHTCPRCPELKTPLGDTTHTCPRCPELKTPLGDTTHTCPRCPELKTPLGDTTHTCPRCPELKTPLGDTTHTCPRCP

SEQ ID NO: 4488 - protein, 49 aa, synthetic construct
  REGION 1..49: note = Synthetic Peptide
ELKTPLGDTTHTCPRCPEPKSCDTPPPCPRCPELKTPLGDTTHTCPRCP

SEQ ID NO: 4489 - protein, 47 aa, synthetic construct
  REGION 1..47: note = Synthetic Peptide
EPKSCDTPPPCPRCPELKTPLGDTTHTCPRCPEPKSCDTPPPCPRCP

SEQ ID NO: 4490 - protein, 64 aa, synthetic construct
  REGION 1..64: note = Synthetic Peptide
ELKTPLGDTTHTCPRCPEPKSCDTPPPCPRCPELKTPLGDTTHTCPRCPEPKSCDTPPPCPRCP

SEQ ID NO: 4491 - protein, 64 aa, synthetic construct
  REGION 1..64: note = Synthetic Peptide
EPKSCDTPPPCPRCPELKTPLGDTTHTCPRCPEPKSCDTPPPCPRCPELKTPLGDTTHTCPRCP

SEQ ID NO: 4492 - protein, 81 aa, synthetic construct
  REGION 1..81: note = Synthetic Peptide
ELKTPLGDTTHTCPRCPEPKSCDTPPPCPRCPELKTPLGDTTHTCPRCPEPKSCDTPPPCPRCPELKTPLGDTTHTCPRCP

SEQ ID NO: 4493 - protein, 79 aa, synthetic construct
  REGION 1..79: note = Synthetic Peptide
EPKSCDTPPPCPRCPELKTPLGDTTHTCPRCPEPKSCDTPPPCPRCPELKTPLGDTTHTCPRCPEPKSCDTPPPCPRCP

SEQ ID NO: 4494 - protein, 96 aa, synthetic construct
  REGION 1..96: note = Synthetic Peptide
ELKTPLGDTTHTCPRCPEPKSCDTPPPCPRCPELKTPLGDTTHTCPRCPEPKSCDTPPPCPRCPELKTPLGDTTHTCPRCPEPKSCDTPPPCPRCP

SEQ ID NO: 4495 - protein, 96 aa, synthetic construct
  REGION 1..96: note = Synthetic Peptide
EPKSCDTPPPCPRCPELKTPLGDTTHTCPRCPEPKSCDTPPPCPRCPELKTPLGDTTHTCPRCPEPKSCDTPPPCPRCPELKTPLGDTTHTCPRCP

SEQ ID NO: 4496 - protein, 119 aa, synthetic construct
  REGION 1..119: note = Synthetic Peptide
ELKTPLGDTTHTCPRCPELKTPLGDTTHTCPRCPELKTPLGDTTHTCPRCPELKTPLGDTTHTCPRCPELKTPLGDTTHTCPRCPELKTPLGDTTHTCPRCPELKTPLGDTTHTCPRCP

SEQ ID NO: 4497 - protein, 136 aa, synthetic construct
  REGION 1..136: note = Synthetic Peptide
ELKTPLGDTTHTCPRCPELKTPLGDTTHTCPRCPELKTPLGDTTHTCPRCPELKTPLGDTTHTCPRCPELKTPLGDTTHTCPRCPELKTPLGDTTHTCPRCPELKTPLGDTTHTCPRCPELKTPLGDTTHTCPRCP

SEQ ID NO: 4498 - protein, 153 aa, synthetic construct
  REGION 1..153: note = Synthetic Peptide
ELKTPLGDTTHTCPRCPELKTPLGDTTHTCPRCPELKTPLGDTTHTCPRCPELKTPLGDTTHTCPRCPELKTPLGDTTHTCPRCPELKTPLGDTTHTCPRCPELKTPLGDTTHTCPRCPELKTPLGDTTHTCPRCPELKTPLGDTTHTCPRCP

SEQ ID NO: 4499 - protein, 170 aa, synthetic construct
  REGION 1..170: note = Synthetic Peptide
ELKTPLGDTTHTCPRCPELKTPLGDTTHTCPRCPELKTPLGDTTHTCPRCPELKTPLGDTTHTCPRCPELKTPLGDTTHTCPRCPELKTPLGDTTHTCPRCPELKTPLGDTTHTCPRCPELKTPLGDTTHTCPRCPELKTPLGDTTHTCPRCPELKTPLGDTTHTCPRCP

SEQ ID NO: 4500 - protein, 187 aa, synthetic construct
  REGION 1..187: note = Synthetic Peptide
ELKTPLGDTTHTCPRCPELKTPLGDTTHTCPRCPELKTPLGDTTHTCPRCPELKTPLGDTTHTCPRCPELKTPLGDTTHTCPRCPELKTPLGDTTHTCPRCPELKTPLGDTTHTCPRCPELKTPLGDTTHTCPRCPELKTPLGDTTHTCPRCPELKTPLGDTTHTCPRCPELKTPLGDTTHTCPRCP

SEQ ID NO: 4501 - protein, 204 aa, synthetic construct
  REGION 1..204: note = Synthetic Peptide
ELKTPLGDTTHTCPRCPELKTPLGDTTHTCPRCPELKTPLGDTTHTCPRCPELKTPLGDTTHTCPRCPELKTPLGDTTHTCPRCPELKTPLGDTTHTCPRCPELKTPLGDTTHTCPRCPELKTPLGDTTHTCPRCPELKTPLGDTTHTCPRCPELKTPLGDTTHTCPRCPELKTPLGDTTHTCPRCPELKTPLGDTTHTCPRCP

SEQ ID NO: 4502 - protein, 221 aa, synthetic construct
  REGION 1..221: note = Synthetic Peptide
ELKTPLGDTTHTCPRCPELKTPLGDTTHTCPRCPELKTPLGDTTHTCPRCPELKTPLGDTTHTCPRCPELKTPLGDTTHTCPRCPELKTPLGDTTHTCPRCPELKTPLGDTTHTCPRCPELKTPLGDTTHTCPRCPELKTPLGDTTHTCPRCPELKTPLGDTTHTCPRCPELKTPLGDTTHTCPRCPELKTPLGDTTHTCPRCPELKTPLGDTTHTCPRCP

SEQ ID NO: 4503 - protein, 238 aa, synthetic construct
  REGION 1..238: note = Synthetic Peptide
ELKTPLGDTTHTCPRCPELKTPLGDTTHTCPRCPELKTPLGDTTHTCPRCPELKTPLGDTTHTCPRCPELKTPLGDTTHTCPRCPELKTPLGDTTHTCPRCPELKTPLGDTTHTCPRCPELKTPLGDTTHTCPRCPELKTPLGDTTHTCPRCPELKTPLGDTTHTCPRCPELKTPLGDTTHTCPRCPELKTPLGDTTHTCPRCPELKTPLGDTTHTCPRCPELKTPLGDTTHTCPRCP

SEQ ID NO: 4504 - protein, 255 aa, synthetic construct
  REGION 1..255: note = Synthetic Peptide
ELKTPLGDTTHTCPRCPELKTPLGDTTHTCPRCPELKTPLGDTTHTCPRCPELKTPLGDTTHTCPRCPELKTPLGDTTHTCPRCPELKTPLGDTTHTCPRCPELKTPLGDTTHTCPRCPELKTPLGDTTHTCPRCPELKTPLGDTTHTCPRCPELKTPLGDTTHTCPRCPELKTPLGDTTHTCPRCPELKTPLGDTTHTCPRCPELKTPLGDTTHTCPRCPELKTPLGDTTHTCPRCPELKTPLGDTTHTCPRCP

SEQ ID NO: 4505 - protein, 272 aa, synthetic construct
  REGION 1..272: note = Synthetic Peptide
ELKTPLGDTTHTCPRCPELKTPLGDTTHTCPRCPELKTPLGDTTHTCPRCPELKTPLGDTTHTCPRCPELKTPLGDTTHTCPRCPELKTPLGDTTHTCPRCPELKTPLGDTTHTCPRCPELKTPLGDTTHTCPRCPELKTPLGDTTHTCPRCPELKTPLGDTTHTCPRCPELKTPLGDTTHTCPRCPELKTPLGDTTHTCPRCPELKTPLGDTTHTCPRCPELKTPLGDTTHTCPRCPELKTPLGDTTHTCPRCPELKTPLGDTTHTCPRCP

SEQ ID NO: 4506 - protein, 289 aa, synthetic construct
  REGION 1..289: note = Synthetic Peptide
ELKTPLGDTTHTCPRCPELKTPLGDTTHTCPRCPELKTPLGDTTHTCPRCPELKTPLGDTTHTCPRCPELKTPLGDTTHTCPRCPELKTPLGDTTHTCPRCPELKTPLGDTTHTCPRCPELKTPLGDTTHTCPRCPELKTPLGDTTHTCPRCPELKTPLGDTTHTCPRCPELKTPLGDTTHTCPRCPELKTPLGDTTHTCPRCPELKTPLGDTTHTCPRCPELKTPLGDTTHTCPRCPELKTPLGDTTHTCPRCPELKTPLGDTTHTCPRCPELKTPLGDTTHTCPRCP

SEQ ID NO: 4507 - protein, 105 aa, synthetic construct
  REGION 1..105: note = Synthetic Peptide
EPKSCDTPPPCPRCPEPKSCDTPPPCPRCPEPKSCDTPPPCPRCPEPKSCDTPPPCPRCPEPKSCDTPPPCPRCPEPKSCDTPPPCPRCPEPKSCDTPPPCPRCP

SEQ ID NO: 4508 - protein, 120 aa, synthetic construct
  REGION 1..120: note = Synthetic Peptide
EPKSCDTPPPCPRCPEPKSCDTPPPCPRCPEPKSCDTPPPCPRCPEPKSCDTPPPCPRCPEPKSCDTPPPCPRCPEPKSCDTPPPCPRCPEPKSCDTPPPCPRCPEPKSCDTPPPCPRCP

SEQ ID NO: 4509 - protein, 135 aa, synthetic construct
  REGION 1..135: note = Synthetic Peptide
EPKSCDTPPPCPRCPEPKSCDTPPPCPRCPEPKSCDTPPPCPRCPEPKSCDTPPPCPRCPEPKSCDTPPPCPRCPEPKSCDTPPPCPRCPEPKSCDTPPPCPRCPEPKSCDTPPPCPRCPEPKSCDTPPPCPRCP

SEQ ID NO: 4510 - protein, 150 aa, synthetic construct
  REGION 1..150: note = Synthetic Peptide
EPKSCDTPPPCPRCPEPKSCDTPPPCPRCPEPKSCDTPPPCPRCPEPKSCDTPPPCPRCPEPKSCDTPPPCPRCPEPKSCDTPPPCPRCPEPKSCDTPPPCPRCPEPKSCDTPPPCPRCPEPKSCDTPPPCPRCPEPKSCDTPPPCPRCP

SEQ ID NO: 4511 - protein, 165 aa, synthetic construct
  REGION 1..165: note = Synthetic Peptide
EPKSCDTPPPCPRCPEPKSCDTPPPCPRCPEPKSCDTPPPCPRCPEPKSCDTPPPCPRCPEPKSCDTPPPCPRCPEPKSCDTPPPCPRCPEPKSCDTPPPCPRCPEPKSCDTPPPCPRCPEPKSCDTPPPCPRCPEPKSCDTPPPCPRCPEPKSCDTPPPCPRCP

SEQ ID NO: 4512 - protein, 180 aa, synthetic construct
  REGION 1..180: note = Synthetic Peptide
EPKSCDTPPPCPRCPEPKSCDTPPPCPRCPEPKSCDTPPPCPRCPEPKSCDTPPPCPRCPEPKSCDTPPPCPRCPEPKSCDTPPPCPRCPEPKSCDTPPPCPRCPEPKSCDTPPPCPRCPEPKSCDTPPPCPRCPEPKSCDTPPPCPRCPEPKSCDTPPPCPRCPEPKSCDTPPPCPRCP

SEQ ID NO: 4513 - protein, 195 aa, synthetic construct
  REGION 1..195: note = Synthetic Peptide
EPKSCDTPPPCPRCPEPKSCDTPPPCPRCPEPKSCDTPPPCPRCPEPKSCDTPPPCPRCPEPKSCDTPPPCPRCPEPKSCDTPPPCPRCPEPKSCDTPPPCPRCPEPKSCDTPPPCPRCPEPKSCDTPPPCPRCPEPKSCDTPPPCPRCPEPKSCDTPPPCPRCPEPKSCDTPPPCPRCPEPKSCDTPPPCPRCP

SEQ ID NO: 4514 - protein, 210 aa, synthetic construct
  REGION 1..210: note = Synthetic Peptide
EPKSCDTPPPCPRCPEPKSCDTPPPCPRCPEPKSCDTPPPCPRCPEPKSCDTPPPCPRCPEPKSCDTPPPCPRCPEPKSCDTPPPCPRCPEPKSCDTPPPCPRCPEPKSCDTPPPCPRCPEPKSCDTPPPCPRCPEPKSCDTPPPCPRCPEPKSCDTPPPCPRCPEPKSCDTPPPCPRCPEPKSCDTPPPCPRCPEPKSCDTPPPCPRCP

SEQ ID NO: 4515 - protein, 225 aa, synthetic construct
  REGION 1..225: note = Synthetic Peptide
EPKSCDTPPPCPRCPEPKSCDTPPPCPRCPEPKSCDTPPPCPRCPEPKSCDTPPPCPRCPEPKSCDTPPPCPRCPEPKSCDTPPPCPRCPEPKSCDTPPPCPRCPEPKSCDTPPPCPRCPEPKSCDTPPPCPRCPEPKSCDTPPPCPRCPEPKSCDTPPPCPRCPEPKSCDTPPPCPRCPEPKSCDTPPPCPRCPEPKSCDTPPPCPRCPEPKSCDTPPPCPRCP

SEQ ID NO: 4516 - protein, 240 aa, synthetic construct
  REGION 1..240: note = Synthetic Peptide
EPKSCDTPPPCPRCPEPKSCDTPPPCPRCPEPKSCDTPPPCPRCPEPKSCDTPPPCPRCPEPKSCDTPPPCPRCPEPKSCDTPPPCPRCPEPKSCDTPPPCPRCPEPKSCDTPPPCPRCPEPKSCDTPPPCPRCPEPKSCDTPPPCPRCPEPKSCDTPPPCPRCPEPKSCDTPPPCPRCPEPKSCDTPPPCPRCPEPKSCDTPPPCPRCPEPKSCDTPPPCPRCPEPKSCDTPPPCPRCP

SEQ ID NO: 4517 - protein, 255 aa, synthetic construct
  REGION 1..255: note = Synthetic Peptide
EPKSCDTPPPCPRCPEPKSCDTPPPCPRCPEPKSCDTPPPCPRCPEPKSCDTPPPCPRCPEPKSCDTPPPCPRCPEPKSCDTPPPCPRCPEPKSCDTPPPCPRCPEPKSCDTPPPCPRCPEPKSCDTPPPCPRCPEPKSCDTPPPCPRCPEPKSCDTPPPCPRCPEPKSCDTPPPCPRCPEPKSCDTPPPCPRCPEPKSCDTPPPCPRCPEPKSCDTPPPCPRCPEPKSCDTPPPCPRCPEPKSCDTPPPCPRCP

SEQ ID NO: 4518 - protein, 270 aa, synthetic construct
  REGION 1..270: note = Synthetic Peptide
EPKSCDTPPPCPRCPEPKSCDTPPPCPRCPEPKSCDTPPPCPRCPEPKSCDTPPPCPRCPEPKSCDTPPPCPRCPEPKSCDTPPPCPRCPEPKSCDTPPPCPRCPEPKSCDTPPPCPRCPEPKSCDTPPPCPRCPEPKSCDTPPPCPRCPEPKSCDTPPPCPRCPEPKSCDTPPPCPRCPEPKSCDTPPPCPRCPEPKSCDTPPPCPRCPEPKSCDTPPPCPRCPEPKSCDTPPPCPRCPEPKSCDTPPPCPRCPEPKSCDTPPPCPRCP

SEQ ID NO: 4519 - protein, 4 aa, synthetic construct
  REGION 1..4: note = Synthetic Peptide
KEIF

SEQ ID NO: 4520 - protein, 5 aa, synthetic construct
  REGION 1..5: note = Synthetic Peptide
KKEIF

SEQ ID NO: 4521 - protein, 4 aa, synthetic construct
  REGION 1..4: note = Synthetic Peptide
AVQD

SEQ ID NO: 4522 - protein, 5 aa, synthetic construct
  REGION 1..5: note = Synthetic Peptide
AVQDL

SEQ ID NO: 4523 - protein, 7 aa, synthetic construct
  REGION 1..7: note = Synthetic Peptide
VCPPVPP

SEQ ID NO: 4524 - protein, 15 aa, synthetic construct
  REGION 1..15: note = Synthetic Peptide
VPCPVPPPPPCCHPR

SEQ ID NO: 4525 - protein, 13 aa, synthetic construct
  REGION 1..13: note = Synthetic Peptide
PCPVPPPPPCCHP

SEQ ID NO: 4526 - protein, 4 aa, synthetic construct
  REGION 1..4: note = Synthetic Peptide
TVPC

SEQ ID NO: 4527 - protein, 5 aa, synthetic construct
  REGION 1..5: note = Synthetic Peptide
VTVPC

SEQ ID NO: 4528 - protein, 4 aa, synthetic construct
  REGION 1..4: note = Synthetic Peptide
PRLS

SEQ ID NO: 4529 - protein, 5 aa, synthetic construct
  REGION 1..5: note = Synthetic Peptide
PRLSL

SEQ ID NO: 4530 - protein, 10 aa, synthetic construct
  REGION 1..10: note = Synthetic Peptide
PVPPPPPCCH

SEQ ID NO: 4531 - protein, 4 aa, synthetic construct
  REGION 1..4: note = Synthetic Peptide
CPPC

SEQ ID NO: 4532 - protein, 4 aa, synthetic construct
  REGION 1..4: note = Synthetic Peptide
CPSC

SEQ ID NO: 4533 - protein, 8 aa, synthetic construct
  REGION 1..8: note = Synthetic Peptide
APELLGGP

SEQ ID NO: 4534 - protein, 4 aa, synthetic construct
  REGION 1..4: note = Synthetic Peptide
APEL

SEQ ID NO: 4535 - protein, 5 aa, synthetic construct
  REGION 1..5: note = Synthetic Peptide
APELL

SEQ ID NO: 4536 - protein, 6 aa, synthetic construct
  REGION 1..6: note = Synthetic Peptide
APELLG

SEQ ID NO: 4537 - protein, 7 aa, synthetic construct
  REGION 1..7: note = Synthetic Peptide
APELLGG

SEQ ID NO: 4538 - protein, 23 aa, synthetic construct
  REGION 1..23: note = Synthetic Peptide
EPKSCDKTHTCPPCPAPELLGGP

SEQ ID NO: 4539 - protein, 4 aa, synthetic construct
  REGION 1..4: note = Synthetic Peptide
DKKV

SEQ ID NO: 4540 - protein, 5 aa, synthetic construct
  REGION 1..5: note = Synthetic Peptide
VDKKV

SEQ ID NO: 4541 - protein, 19 aa, synthetic construct
  REGION 1..19: note = Synthetic Peptide
ERKCCVEVPPCAPELLGGP

SEQ ID NO: 4542 - protein, 4 aa, synthetic construct
  REGION 1..4: note = Synthetic Peptide
DKTV

SEQ ID NO: 4543 - protein, 5 aa, synthetic construct
  REGION 1..5: note = Synthetic Peptide
KDKTV

SEQ ID NO: 4544 - protein, 4 aa, synthetic construct
  REGION 1..4: note = Synthetic Peptide
PAPP

SEQ ID NO: 4545 - protein, 5 aa, synthetic construct
  REGION 1..5: note = Synthetic Peptide
PAPPV

SEQ ID NO: 4546 - protein, 15 aa, synthetic construct
  REGION 1..15: note = Synthetic Peptide
EPKPCDTPPPCPRCP

SEQ ID NO: 4547 - protein, 15 aa, synthetic construct
  REGION 1..15: note = Synthetic Peptide
EPKSCDIPPPCPRCP

SEQ ID NO: 4548 - protein, 15 aa, synthetic construct
  REGION 1..15: note = Synthetic Peptide
EPKSCDTPLPCPRCP

SEQ ID NO: 4549 - protein, 15 aa, synthetic construct
  REGION 1..15: note = Synthetic Peptide
EPKSCDTPPTCPRCP

SEQ ID NO: 4550 - protein, 15 aa, synthetic construct
  REGION 1..15: note = Synthetic Peptide
EPKSCDTSPPCPRCP

SEQ ID NO: 4551 - protein, 15 aa, synthetic construct
  REGION 1..15: note = Synthetic Peptide
EPKSCDTPPTCPRCP

SEQ ID NO: 4552 - protein, 69 aa, synthetic construct
  REGION 1..69: note = Synthetic Peptide
ELKTPLDTTHTCPRCPEPKSCDTPPPCPRCPEPKSCDTPPPCPRCPEPKSCDTPPPCPRCPAPELLGGP

SEQ ID NO: 4553 - protein, 6 aa, synthetic construct
  REGION 1..6: note = Synthetic Peptide
CDTPPP

SEQ ID NO: 4554 - protein, 4 aa, synthetic construct
  REGION 1..4: note = Synthetic Peptide
DKRV

SEQ ID NO: 4555 - protein, 5 aa, synthetic construct
  REGION 1..5: note = Synthetic Peptide
VDKRV

SEQ ID NO: 4556 - protein, 8 aa, synthetic construct
  REGION 1..8: note = Synthetic Peptide
APEFLGGP

SEQ ID NO: 4557 - protein, 4 aa, synthetic construct
  REGION 1..4: note = Synthetic Peptide
APEF

SEQ ID NO: 4558 - protein, 5 aa, synthetic construct
  REGION 1..5: note = Synthetic Peptide
APEFL

SEQ ID NO: 4559 - protein, 6 aa, synthetic construct
  REGION 1..6: note = Synthetic Peptide
APEFLG

SEQ ID NO: 4560 - protein, 7 aa, synthetic construct
  REGION 1..7: note = Synthetic Peptide
APEFLGG

SEQ ID NO: 4561 - protein, 20 aa, synthetic construct
  REGION 1..20: note = Synthetic Peptide
ESKYGPPCPSCPAPEFLGGP

SEQ ID NO: 4562 - protein, 4 aa, synthetic construct
  REGION 1..4: note = Synthetic Peptide
SSTD

SEQ ID NO: 4563 - protein, 5 aa, synthetic construct
  REGION 1..5: note = Synthetic Peptide
PSSTD

SEQ ID NO: 4564 - protein, 4 aa, synthetic construct
  REGION 1..4: note = Synthetic Peptide
KILQ

SEQ ID NO: 4565 - protein, 5 aa, synthetic construct
  REGION 1..5: note = Synthetic Peptide
KILQS

SEQ ID NO: 4566 - protein, 19 aa, synthetic construct
  REGION 1..19: note = Synthetic Peptide
VIAELPPKVSVFVPPRDGF

SEQ ID NO: 4567 - protein, 19 aa, synthetic construct
  REGION 1..19: note = Synthetic Peptide
IAELPPKVSVFVPPRDGFF

SEQ ID NO: 4568 - protein, 19 aa, synthetic construct
  REGION 1..19: note = Synthetic Peptide
AELPPKVSVFVPPRDGFFG

SEQ ID NO: 4569 - protein, 19 aa, synthetic construct
  REGION 1..19: note = Synthetic Peptide
ELPPKVSVFVPPRDGFFGN

SEQ ID NO: 4570 - protein, 19 aa, synthetic construct
  REGION 1..19: note = Synthetic Peptide
LPPKVSVFVPPRDGFFGNP

SEQ ID NO: 4571 - protein, 18 aa, synthetic construct
  REGION 1..18: note = Synthetic Peptide
PLPVIAELPPKVSVFVPP

SEQ ID NO: 4572 - protein, 18 aa, synthetic construct
  REGION 1..18: note = Synthetic Peptide
LPVIAELPPKVSVFVPPR

SEQ ID NO: 4573 - protein, 18 aa, synthetic construct
  REGION 1..18: note = Synthetic Peptide
PVIAELPPKVSVFVPPRD

SEQ ID NO: 4574 - protein, 18 aa, synthetic construct
  REGION 1..18: note = Synthetic Peptide
VIAELPPKVSVFVPPRDG

SEQ ID NO: 4575 - protein, 18 aa, synthetic construct
  REGION 1..18: note = Synthetic Peptide
IAELPPKVSVFVPPRDGF

SEQ ID NO: 4576 - protein, 18 aa, synthetic construct
  REGION 1..18: note = Synthetic Peptide
AELPPKVSVFVPPRDGFF

SEQ ID NO: 4577 - protein, 18 aa, synthetic construct
  REGION 1..18: note = Synthetic Peptide
ELPPKVSVFVPPRDGFFG

SEQ ID NO: 4578 - protein, 18 aa, synthetic construct
  REGION 1..18: note = Synthetic Peptide
LPPKVSVFVPPRDGFFGN

SEQ ID NO: 4579 - protein, 18 aa, synthetic construct
  REGION 1..18: note = Synthetic Peptide
PPKVSVFVPPRDGFFGNP

SEQ ID NO: 4580 - protein, 17 aa, synthetic construct
  REGION 1..17: note = Synthetic Peptide
PLPVIAELPPKVSVFVP

SEQ ID NO: 4581 - protein, 17 aa, synthetic construct
  REGION 1..17: note = Synthetic Peptide
LPVIAELPPKVSVFVPP

SEQ ID NO: 4582 - protein, 17 aa, synthetic construct
  REGION 1..17: note = Synthetic Peptide
PVIAELPPKVSVFVPPR

SEQ ID NO: 4583 - protein, 17 aa, synthetic construct
  REGION 1..17: note = Synthetic Peptide
VIAELPPKVSVFVPPRD

SEQ ID NO: 4584 - protein, 17 aa, synthetic construct
  REGION 1..17: note = Synthetic Peptide
IAELPPKVSVFVPPRDG

SEQ ID NO: 4585 - protein, 17 aa, synthetic construct
  REGION 1..17: note = Synthetic Peptide
AELPPKVSVFVPPRDGF

SEQ ID NO: 4586 - protein, 17 aa, synthetic construct
  REGION 1..17: note = Synthetic Peptide
ELPPKVSVFVPPRDGFF

SEQ ID NO: 4587 - protein, 17 aa, synthetic construct
  REGION 1..17: note = Synthetic Peptide
LPPKVSVFVPPRDGFFG

SEQ ID NO: 4588 - protein, 17 aa, synthetic construct
  REGION 1..17: note = Synthetic Peptide
PPKVSVFVPPRDGFFGN

SEQ ID NO: 4589 - protein, 17 aa, synthetic construct
  REGION 1..17: note = Synthetic Peptide
PKVSVFVPPRDGFFGNP

SEQ ID NO: 4590 - protein, 16 aa, synthetic construct
  REGION 1..16: note = Synthetic Peptide
PLPVIAELPPKVSVFV

SEQ ID NO: 4591 - protein, 16 aa, synthetic construct
  REGION 1..16: note = Synthetic Peptide
LPVIAELPPKVSVFVP

SEQ ID NO: 4592 - protein, 16 aa, synthetic construct
  REGION 1..16: note = Synthetic Peptide
PVIAELPPKVSVFVPP

SEQ ID NO: 4593 - protein, 16 aa, synthetic construct
  REGION 1..16: note = Synthetic Peptide
VIAELPPKVSVFVPPR

SEQ ID NO: 4594 - protein, 16 aa, synthetic construct
  REGION 1..16: note = Synthetic Peptide
IAELPPKVSVFVPPRD

SEQ ID NO: 4595 - protein, 16 aa, synthetic construct
  REGION 1..16: note = Synthetic Peptide
AELPPKVSVFVPPRDG

SEQ ID NO: 4596 - protein, 16 aa, synthetic construct
  REGION 1..16: note = Synthetic Peptide
ELPPKVSVFVPPRDGF

SEQ ID NO: 4597 - protein, 16 aa, synthetic construct
  REGION 1..16: note = Synthetic Peptide
LPPKVSVFVPPRDGFF

SEQ ID NO: 4598 - protein, 16 aa, synthetic construct
  REGION 1..16: note = Synthetic Peptide
PPKVSVFVPPRDGFFG

SEQ ID NO: 4599 - protein, 16 aa, synthetic construct
  REGION 1..16: note = Synthetic Peptide
PKVSVFVPPRDGFFGN

SEQ ID NO: 4600 - protein, 16 aa, synthetic construct
  REGION 1..16: note = Synthetic Peptide
KVSVFVPPRDGFFGNP

SEQ ID NO: 4601 - protein, 15 aa, synthetic construct
  REGION 1..15: note = Synthetic Peptide
PLPVIAELPPKVSVF

SEQ ID NO: 4602 - protein, 15 aa, synthetic construct
  REGION 1..15: note = Synthetic Peptide
LPVIAELPPKVSVFV

SEQ ID NO: 4603 - protein, 15 aa, synthetic construct
  REGION 1..15: note = Synthetic Peptide
PVIAELPPKVSVFVP

SEQ ID NO: 4604 - protein, 15 aa, synthetic construct
  REGION 1..15: note = Synthetic Peptide
VIAELPPKVSVFVPP

SEQ ID NO: 4605 - protein, 15 aa, synthetic construct
  REGION 1..15: note = Synthetic Peptide
IAELPPKVSVFVPPR

SEQ ID NO: 4606 - protein, 15 aa, synthetic construct
  REGION 1..15: note = Synthetic Peptide
AELPPKVSVFVPPRD

SEQ ID NO: 4607 - protein, 15 aa, synthetic construct
  REGION 1..15: note = Synthetic Peptide
ELPPKVSVFVPPRDG

SEQ ID NO: 4608 - protein, 15 aa, synthetic construct
  REGION 1..15: note = Synthetic Peptide
LPPKVSVFVPPRDGF

SEQ ID NO: 4609 - protein, 15 aa, synthetic construct
  REGION 1..15: note = Synthetic Peptide
PPKVSVFVPPRDGFF

SEQ ID NO: 4610 - protein, 15 aa, synthetic construct
  REGION 1..15: note = Synthetic Peptide
PKVSVFVPPRDGFFG

SEQ ID NO: 4611 - protein, 15 aa, synthetic construct
  REGION 1..15: note = Synthetic Peptide
KVSVFVPPRDGFFGN

SEQ ID NO: 4612 - protein, 15 aa, synthetic construct
  REGION 1..15: note = Synthetic Peptide
VSVFVPPRDGFFGNP

SEQ ID NO: 4613 - protein, 14 aa, synthetic construct
  REGION 1..14: note = Synthetic Peptide
PLPVIAELPPKVSV

SEQ ID NO: 4614 - protein, 14 aa, synthetic construct
  REGION 1..14: note = Synthetic Peptide
LPVIAELPPKVSVF

SEQ ID NO: 4615 - protein, 14 aa, synthetic construct
  REGION 1..14: note = Synthetic Peptide
PVIAELPPKVSVFV

SEQ ID NO: 4616 - protein, 14 aa, synthetic construct
  REGION 1..14: note = Synthetic Peptide
VIAELPPKVSVFVP

SEQ ID NO: 4617 - protein, 14 aa, synthetic construct
  REGION 1..14: note = Synthetic Peptide
IAELPPKVSVFVPP

SEQ ID NO: 4618 - protein, 14 aa, synthetic construct
  REGION 1..14: note = Synthetic Peptide
AELPPKVSVFVPPR

SEQ ID NO: 4619 - protein, 14 aa, synthetic construct
  REGION 1..14: note = Synthetic Peptide
ELPPKVSVFVPPRD

SEQ ID NO: 4620 - protein, 14 aa, synthetic construct
  REGION 1..14: note = Synthetic Peptide
LPPKVSVFVPPRDG

SEQ ID NO: 4621 - protein, 14 aa, synthetic construct
  REGION 1..14: note = Synthetic Peptide
PPKVSVFVPPRDGF

SEQ ID NO: 4622 - protein, 14 aa, synthetic construct
  REGION 1..14: note = Synthetic Peptide
PKVSVFVPPRDGFF

SEQ ID NO: 4623 - protein, 14 aa, synthetic construct
  REGION 1..14: note = Synthetic Peptide
KVSVFVPPRDGFFG

SEQ ID NO: 4624 - protein, 14 aa, synthetic construct
  REGION 1..14: note = Synthetic Peptide
VSVFVPPRDGFFGN

SEQ ID NO: 4625 - protein, 14 aa, synthetic construct
  REGION 1..14: note = Synthetic Peptide
SVFVPPRDGFFGNP

SEQ ID NO: 4626 - protein, 13 aa, synthetic construct
  REGION 1..13: note = Synthetic Peptide
PLPVIAELPPKVS

SEQ ID NO: 4627 - protein, 13 aa, synthetic construct
  REGION 1..13: note = Synthetic Peptide
LPVIAELPPKVSV

SEQ ID NO: 4628 - protein, 13 aa, synthetic construct
  REGION 1..13: note = Synthetic Peptide
PVIAELPPKVSVF

SEQ ID NO: 4629 - protein, 13 aa, synthetic construct
  REGION 1..13: note = Synthetic Peptide
VIAELPPKVSVFV

SEQ ID NO: 4630 - protein, 13 aa, synthetic construct
  REGION 1..13: note = Synthetic Peptide
IAELPPKVSVFVP

SEQ ID NO: 4631 - protein, 13 aa, synthetic construct
  REGION 1..13: note = Synthetic Peptide
AELPPKVSVFVPP

SEQ ID NO: 4632 - protein, 13 aa, synthetic construct
  REGION 1..13: note = Synthetic Peptide
ELPPKVSVFVPPR

SEQ ID NO: 4633 - protein, 13 aa, synthetic construct
  REGION 1..13: note = Synthetic Peptide
LPPKVSVFVPPRD

SEQ ID NO: 4634 - protein, 13 aa, synthetic construct
  REGION 1..13: note = Synthetic Peptide
PPKVSVFVPPRDG

SEQ ID NO: 4635 - protein, 13 aa, synthetic construct
  REGION 1..13: note = Synthetic Peptide
PKVSVFVPPRDGF

SEQ ID NO: 4636 - protein, 13 aa, synthetic construct
  REGION 1..13: note = Synthetic Peptide
KVSVFVPPRDGFF

SEQ ID NO: 4637 - protein, 13 aa, synthetic construct
  REGION 1..13: note = Synthetic Peptide
VSVFVPPRDGFFG

SEQ ID NO: 4638 - protein, 13 aa, synthetic construct
  REGION 1..13: note = Synthetic Peptide
SVFVPPRDGFFGN

SEQ ID NO: 4639 - protein, 13 aa, synthetic construct
  REGION 1..13: note = Synthetic Peptide
VFVPPRDGFFGNP

SEQ ID NO: 4640 - protein, 12 aa, synthetic construct
  REGION 1..12: note = Synthetic Peptide
PLPVIAELPPKV

SEQ ID NO: 4641 - protein, 12 aa, synthetic construct
  REGION 1..12: note = Synthetic Peptide
LPVIAELPPKVS

SEQ ID NO: 4642 - protein, 12 aa, synthetic construct
  REGION 1..12: note = Synthetic Peptide
PVIAELPPKVSV

SEQ ID NO: 4643 - protein, 12 aa, synthetic construct
  REGION 1..12: note = Synthetic Peptide
VIAELPPKVSVF

SEQ ID NO: 4644 - protein, 12 aa, synthetic construct
  REGION 1..12: note = Synthetic Peptide
IAELPPKVSVFV

SEQ ID NO: 4645 - protein, 12 aa, synthetic construct
  REGION 1..12: note = Synthetic Peptide
AELPPKVSVFVP

SEQ ID NO: 4646 - protein, 12 aa, synthetic construct
  REGION 1..12: note = Synthetic Peptide
ELPPKVSVFVPP

SEQ ID NO: 4647 - protein, 12 aa, synthetic construct
  REGION 1..12: note = Synthetic Peptide
LPPKVSVFVPPR

SEQ ID NO: 4648 - protein, 12 aa, synthetic construct
  REGION 1..12: note = Synthetic Peptide
PPKVSVFVPPRD

SEQ ID NO: 4649 - protein, 12 aa, synthetic construct
  REGION 1..12: note = Synthetic Peptide
PKVSVFVPPRDG

SEQ ID NO: 4650 - protein, 12 aa, synthetic construct
  REGION 1..12: note = Synthetic Peptide
KVSVFVPPRDGF

SEQ ID NO: 4651 - protein, 12 aa, synthetic construct
  REGION 1..12: note = Synthetic Peptide
VSVFVPPRDGFF

SEQ ID NO: 4652 - protein, 12 aa, synthetic construct
  REGION 1..12: note = Synthetic Peptide
SVFVPPRDGFFG

SEQ ID NO: 4653 - protein, 12 aa, synthetic construct
  REGION 1..12: note = Synthetic Peptide
VFVPPRDGFFGN

SEQ ID NO: 4654 - protein, 12 aa, synthetic construct
  REGION 1..12: note = Synthetic Peptide
FVPPRDGFFGNP

SEQ ID NO: 4655 - protein, 11 aa, synthetic construct
  REGION 1..11: note = Synthetic Peptide
PLPVIAELPPK

SEQ ID NO: 4656 - protein, 11 aa, synthetic construct
  REGION 1..11: note = Synthetic Peptide
LPVIAELPPKV

SEQ ID NO: 4657 - protein, 11 aa, synthetic construct
  REGION 1..11: note = Synthetic Peptide
PVIAELPPKVS

SEQ ID NO: 4658 - protein, 11 aa, synthetic construct
  REGION 1..11: note = Synthetic Peptide
VIAELPPKVSV

SEQ ID NO: 4659 - protein, 11 aa, synthetic construct
  REGION 1..11: note = Synthetic Peptide
IAELPPKVSVF

SEQ ID NO: 4660 - protein, 11 aa, synthetic construct
  REGION 1..11: note = Synthetic Peptide
AELPPKVSVFV

SEQ ID NO: 4661 - protein, 11 aa, synthetic construct
  REGION 1..11: note = Synthetic Peptide
ELPPKVSVFVP

SEQ ID NO: 4662 - protein, 11 aa, synthetic construct
  REGION 1..11: note = Synthetic Peptide
LPPKVSVFVPP

SEQ ID NO: 4663 - protein, 11 aa, synthetic construct
  REGION 1..11: note = Synthetic Peptide
PPKVSVFVPPR

SEQ ID NO: 4664 - protein, 11 aa, synthetic construct
  REGION 1..11: note = Synthetic Peptide
PKVSVFVPPRD

SEQ ID NO: 4665 - protein, 11 aa, synthetic construct
  REGION 1..11: note = Synthetic Peptide
KVSVFVPPRDG

SEQ ID NO: 4666 - protein, 11 aa, synthetic construct
  REGION 1..11: note = Synthetic Peptide
VSVFVPPRDGF

SEQ ID NO: 4667 - protein, 11 aa, synthetic construct
  REGION 1..11: note = Synthetic Peptide
SVFVPPRDGFF

SEQ ID NO: 4668 - protein, 11 aa, synthetic construct
  REGION 1..11: note = Synthetic Peptide
VFVPPRDGFFG

SEQ ID NO: 4669 - protein, 11 aa, synthetic construct
  REGION 1..11: note = Synthetic Peptide
FVPPRDGFFGN

SEQ ID NO: 4670 - protein, 11 aa, synthetic construct
  REGION 1..11: note = Synthetic Peptide
VPPRDGFFGNP

SEQ ID NO: 4671 - protein, 10 aa, synthetic construct
  REGION 1..10: note = Synthetic Peptide
PLPVIAELPP

SEQ ID NO: 4672 - protein, 10 aa, synthetic construct
  REGION 1..10: note = Synthetic Peptide
LPVIAELPPK

SEQ ID NO: 4673 - protein, 10 aa, synthetic construct
  REGION 1..10: note = Synthetic Peptide
PVIAELPPKV

SEQ ID NO: 4674 - protein, 10 aa, synthetic construct
  REGION 1..10: note = Synthetic Peptide
VIAELPPKVS

SEQ ID NO: 4675 - protein, 10 aa, synthetic construct
  REGION 1..10: note = Synthetic Peptide
IAELPPKVSV

SEQ ID NO: 4676 - protein, 10 aa, synthetic construct
  REGION 1..10: note = Synthetic Peptide
AELPPKVSVF

SEQ ID NO: 4677 - protein, 10 aa, synthetic construct
  REGION 1..10: note = Synthetic Peptide
ELPPKVSVFV

SEQ ID NO: 4678 - protein, 10 aa, synthetic construct
  REGION 1..10: note = Synthetic Peptide
LPPKVSVFVP

SEQ ID NO: 4679 - protein, 10 aa, synthetic construct
  REGION 1..10: note = Synthetic Peptide
PPKVSVFVPP

SEQ ID NO: 4680 - protein, 10 aa, synthetic construct
  REGION 1..10: note = Synthetic Peptide
PKVSVFVPPR

SEQ ID NO: 4681 - protein, 10 aa, synthetic construct
  REGION 1..10: note = Synthetic Peptide
KVSVFVPPRD

SEQ ID NO: 4682 - protein, 10 aa, synthetic construct
  REGION 1..10: note = Synthetic Peptide
VSVFVPPRDG

SEQ ID NO: 4683 - protein, 10 aa, synthetic construct
  REGION 1..10: note = Synthetic Peptide
SVFVPPRDGF

SEQ ID NO: 4684 - protein, 10 aa, synthetic construct
  REGION 1..10: note = Synthetic Peptide
VFVPPRDGFF

SEQ ID NO: 4685 - protein, 10 aa, synthetic construct
  REGION 1..10: note = Synthetic Peptide
FVPPRDGFFG

SEQ ID NO: 4686 - protein, 10 aa, synthetic construct
  REGION 1..10: note = Synthetic Peptide
VPPRDGFFGN

SEQ ID NO: 4687 - protein, 10 aa, synthetic construct
  REGION 1..10: note = Synthetic Peptide
PPRDGFFGNP

SEQ ID NO: 4688 - protein, 9 aa, synthetic construct
  REGION 1..9: note = Synthetic Peptide
PLPVIAELP

SEQ ID NO: 4689 - protein, 9 aa, synthetic construct
  REGION 1..9: note = Synthetic Peptide
LPVIAELPP

SEQ ID NO: 4690 - protein, 9 aa, synthetic construct
  REGION 1..9: note = Synthetic Peptide
PVIAELPPK

SEQ ID NO: 4691 - protein, 9 aa, synthetic construct
  REGION 1..9: note = Synthetic Peptide
VIAELPPKV

SEQ ID NO: 4692 - protein, 9 aa, synthetic construct
  REGION 1..9: note = Synthetic Peptide
IAELPPKVS

SEQ ID NO: 4693 - protein, 9 aa, synthetic construct
  REGION 1..9: note = Synthetic Peptide
AELPPKVSV

SEQ ID NO: 4694 - protein, 9 aa, synthetic construct
  REGION 1..9: note = Synthetic Peptide
ELPPKVSVF

SEQ ID NO: 4695 - protein, 9 aa, synthetic construct
  REGION 1..9: note = Synthetic Peptide
LPPKVSVFV

SEQ ID NO: 4696 - protein, 9 aa, synthetic construct
  REGION 1..9: note = Synthetic Peptide
PPKVSVFVP

SEQ ID NO: 4697 - protein, 9 aa, synthetic construct
  REGION 1..9: note = Synthetic Peptide
PKVSVFVPP

SEQ ID NO: 4698 - protein, 9 aa, synthetic construct
  REGION 1..9: note = Synthetic Peptide
KVSVFVPPR

SEQ ID NO: 4699 - protein, 9 aa, synthetic construct
  REGION 1..9: note = Synthetic Peptide
VSVFVPPRD

SEQ ID NO: 4700 - protein, 9 aa, synthetic construct
  REGION 1..9: note = Synthetic Peptide
SVFVPPRDG

SEQ ID NO: 4701 - protein, 9 aa, synthetic construct
  REGION 1..9: note = Synthetic Peptide
VFVPPRDGF

SEQ ID NO: 4702 - protein, 9 aa, synthetic construct
  REGION 1..9: note = Synthetic Peptide
FVPPRDGFF

SEQ ID NO: 4703 - protein, 9 aa, synthetic construct
  REGION 1..9: note = Synthetic Peptide
VPPRDGFFG

SEQ ID NO: 4704 - protein, 9 aa, synthetic construct
  REGION 1..9: note = Synthetic Peptide
PPRDGFFGN

SEQ ID NO: 4705 - protein, 9 aa, synthetic construct
  REGION 1..9: note = Synthetic Peptide
PRDGFFGNP

SEQ ID NO: 4706 - protein, 8 aa, synthetic construct
  REGION 1..8: note = Synthetic Peptide
PLPVIAEL

SEQ ID NO: 4707 - protein, 8 aa, synthetic construct
  REGION 1..8: note = Synthetic Peptide
LPVIAELP

SEQ ID NO: 4708 - protein, 8 aa, synthetic construct
  REGION 1..8: note = Synthetic Peptide
PVIAELPP

SEQ ID NO: 4709 - protein, 8 aa, synthetic construct
  REGION 1..8: note = Synthetic Peptide
VIAELPPK

SEQ ID NO: 4710 - protein, 8 aa, synthetic construct
  REGION 1..8: note = Synthetic Peptide
IAELPPKV

SEQ ID NO: 4711 - protein, 8 aa, synthetic construct
  REGION 1..8: note = Synthetic Peptide
AELPPKVS

SEQ ID NO: 4712 - protein, 8 aa, synthetic construct
  REGION 1..8: note = Synthetic Peptide
ELPPKVSV

SEQ ID NO: 4713 - protein, 8 aa, synthetic construct
  REGION 1..8: note = Synthetic Peptide
LPPKVSVF

SEQ ID NO: 4714 - protein, 8 aa, synthetic construct
  REGION 1..8: note = Synthetic Peptide
PPKVSVFV

SEQ ID NO: 4715 - protein, 8 aa, synthetic construct
  REGION 1..8: note = Synthetic Peptide
PKVSVFVP

SEQ ID NO: 4716 - protein, 8 aa, synthetic construct
  REGION 1..8: note = Synthetic Peptide
KVSVFVPP

SEQ ID NO: 4717 - protein, 8 aa, synthetic construct
  REGION 1..8: note = Synthetic Peptide
VSVFVPPR

SEQ ID NO: 4718 - protein, 8 aa, synthetic construct
  REGION 1..8: note = Synthetic Peptide
SVFVPPRD

SEQ ID NO: 4719 - protein, 8 aa, synthetic construct
  REGION 1..8: note = Synthetic Peptide
VFVPPRDG

SEQ ID NO: 4720 - protein, 8 aa, synthetic construct
  REGION 1..8: note = Synthetic Peptide
FVPPRDGF

SEQ ID NO: 4721 - protein, 8 aa, synthetic construct
  REGION 1..8: note = Synthetic Peptide
VPPRDGFF

SEQ ID NO: 4722 - protein, 8 aa, synthetic construct
  REGION 1..8: note = Synthetic Peptide
PPRDGFFG

SEQ ID NO: 4723 - protein, 8 aa, synthetic construct
  REGION 1..8: note = Synthetic Peptide
PRDGFFGN

SEQ ID NO: 4724 - protein, 8 aa, synthetic construct
  REGION 1..8: note = Synthetic Peptide
RDGFFGNP

SEQ ID NO: 4725 - protein, 7 aa, synthetic construct
  REGION 1..7: note = Synthetic Peptide
PLPVIAE

SEQ ID NO: 4726 - protein, 7 aa, synthetic construct
  REGION 1..7: note = Synthetic Peptide
LPVIAEL

SEQ ID NO: 4727 - protein, 7 aa, synthetic construct
  REGION 1..7: note = Synthetic Peptide
PVIAELP

SEQ ID NO: 4728 - protein, 7 aa, synthetic construct
  REGION 1..7: note = Synthetic Peptide
VIAELPP

SEQ ID NO: 4729 - protein, 7 aa, synthetic construct
  REGION 1..7: note = Synthetic Peptide
IAELPPK

SEQ ID NO: 4730 - protein, 7 aa, synthetic construct
  REGION 1..7: note = Synthetic Peptide
AELPPKV

SEQ ID NO: 4731 - protein, 7 aa, synthetic construct
  REGION 1..7: note = Synthetic Peptide
ELPPKVS

SEQ ID NO: 4732 - protein, 7 aa, synthetic construct
  REGION 1..7: note = Synthetic Peptide
LPPKVSV

SEQ ID NO: 4733 - protein, 7 aa, synthetic construct
  REGION 1..7: note = Synthetic Peptide
PPKVSVF

SEQ ID NO: 4734 - protein, 7 aa, synthetic construct
  REGION 1..7: note = Synthetic Peptide
PKVSVFV

SEQ ID NO: 4735 - protein, 7 aa, synthetic construct
  REGION 1..7: note = Synthetic Peptide
KVSVFVP

SEQ ID NO: 4736 - protein, 7 aa, synthetic construct
  REGION 1..7: note = Synthetic Peptide
VSVFVPP

SEQ ID NO: 4737 - protein, 7 aa, synthetic construct
  REGION 1..7: note = Synthetic Peptide
SVFVPPR

SEQ ID NO: 4738 - protein, 7 aa, synthetic construct
  REGION 1..7: note = Synthetic Peptide
VFVPPRD

SEQ ID NO: 4739 - protein, 7 aa, synthetic construct
  REGION 1..7: note = Synthetic Peptide
FVPPRDG

SEQ ID NO: 4740 - protein, 7 aa, synthetic construct
  REGION 1..7: note = Synthetic Peptide
VPPRDGF

SEQ ID NO: 4741 - protein, 7 aa, synthetic construct
  REGION 1..7: note = Synthetic Peptide
PPRDGFF

SEQ ID NO: 4742 - protein, 7 aa, synthetic construct
  REGION 1..7: note = Synthetic Peptide
PRDGFFG

SEQ ID NO: 4743 - protein, 7 aa, synthetic construct
  REGION 1..7: note = Synthetic Peptide
RDGFFGN

SEQ ID NO: 4744 - protein, 7 aa, synthetic construct
  REGION 1..7: note = Synthetic Peptide
DGFFGNP

SEQ ID NO: 4745 - protein, 4 aa, synthetic construct
  REGION 1..4: note = Synthetic Peptide
EKNV

SEQ ID NO: 4746 - protein, 5 aa, synthetic construct
  REGION 1..5: note = Synthetic Peptide
KEKNV

SEQ ID NO: 4747 - protein, 4 aa, synthetic construct
  REGION 1..4: note = Synthetic Peptide
RKSK

SEQ ID NO: 4748 - protein, 5 aa, synthetic construct
  REGION 1..5: note = Synthetic Peptide
RKSKL

SEQ ID NO: 4749 - protein, 5 aa, synthetic construct
  REGION 1..5: note = Synthetic Peptide
CPRCP

SEQ ID NO: 4750 - protein, 52 aa, synthetic construct
  REGION 1..52: note = Synthetic Peptide
CPRCPEPKSCDTPPPCPRCPEPKSCDTPPPCPRCPEPKSCDTPPPCPRCPAP

SEQ ID NO: 4751 - protein, 47 aa, synthetic construct
  REGION 1..47: note = Synthetic Peptide
EPKSCDTPPPCPRCPEPKSCDTPPPCPRCPEPKSCDTPPPCPRCPAP

SEQ ID NO: 4752 - protein, 32 aa, synthetic construct
  REGION 1..32: note = Synthetic Peptide
EPKSCDTPPPCPRCPEPKSCDTPPPCPRCPAP

SEQ ID NO: 4753 - protein, 22 aa, synthetic construct
  REGION 1..22: note = Synthetic Peptide
CPRCPEPKSCDTPPPCPRCPAP

SEQ ID NO: 4754 - protein, 17 aa, synthetic construct
  REGION 1..17: note = Synthetic Peptide
EPKSCDTPPPCPRCPAP

SEQ ID NO: 4755 - protein, 7 aa, synthetic construct
  REGION 1..7: note = Synthetic Peptide
ELKTPLG

SEQ ID NO: 4756 - protein, 7 aa, synthetic construct
  REGION 1..7: note = Synthetic Peptide
LKTPLGD

SEQ ID NO: 4757 - protein, 7 aa, synthetic construct
  REGION 1..7: note = Synthetic Peptide
KTPLGDT

SEQ ID NO: 4758 - protein, 7 aa, synthetic construct
  REGION 1..7: note = Synthetic Peptide
TPLGDTT

SEQ ID NO: 4759 - protein, 7 aa, synthetic construct
  REGION 1..7: note = Synthetic Peptide
PLGDTTH

SEQ ID NO: 4760 - protein, 7 aa, synthetic construct
  REGION 1..7: note = Synthetic Peptide
LGDTTHT

SEQ ID NO: 4761 - protein, 7 aa, synthetic construct
  REGION 1..7: note = Synthetic Peptide
GDTTHTC

SEQ ID NO: 4762 - protein, 7 aa, synthetic construct
  REGION 1..7: note = Synthetic Peptide
DTTHTCP

SEQ ID NO: 4763 - protein, 7 aa, synthetic construct
  REGION 1..7: note = Synthetic Peptide
TTHTCPR

SEQ ID NO: 4764 - protein, 7 aa, synthetic construct
  REGION 1..7: note = Synthetic Peptide
THTCPRC

SEQ ID NO: 4765 - protein, 7 aa, synthetic construct
  REGION 1..7: note = Synthetic Peptide
HTCPRCP

SEQ ID NO: 4766 - protein, 7 aa, synthetic construct
  REGION 1..7: note = Synthetic Peptide
TCPRCPE

SEQ ID NO: 4767 - protein, 7 aa, synthetic construct
  REGION 1..7: note = Synthetic Peptide
CPRCPEP

SEQ ID NO: 4768 - protein, 7 aa, synthetic construct
  REGION 1..7: note = Synthetic Peptide
PRCPEPK

SEQ ID NO: 4769 - protein, 7 aa, synthetic construct
  REGION 1..7: note = Synthetic Peptide
RCPEPKS

SEQ ID NO: 4770 - protein, 7 aa, synthetic construct
  REGION 1..7: note = Synthetic Peptide
CPEPKSC

SEQ ID NO: 4771 - protein, 7 aa, synthetic construct
  REGION 1..7: note = Synthetic Peptide
PEPKSCD

SEQ ID NO: 4772 - protein, 7 aa, synthetic construct
  REGION 1..7: note = Synthetic Peptide
EPKSCDT

SEQ ID NO: 4773 - protein, 7 aa, synthetic construct
  REGION 1..7: note = Synthetic Peptide
PKSCDTP

SEQ ID NO: 4774 - protein, 7 aa, synthetic construct
  REGION 1..7: note = Synthetic Peptide
KSCDTPP

SEQ ID NO: 4775 - protein, 7 aa, synthetic construct
  REGION 1..7: note = Synthetic Peptide
SCDTPPP

SEQ ID NO: 4776 - protein, 7 aa, synthetic construct
  REGION 1..7: note = Synthetic Peptide
CDTPPPC

SEQ ID NO: 4777 - protein, 7 aa, synthetic construct
  REGION 1..7: note = Synthetic Peptide
DTPPPCP

SEQ ID NO: 4778 - protein, 7 aa, synthetic construct
  REGION 1..7: note = Synthetic Peptide
TPPPCPR

SEQ ID NO: 4779 - protein, 7 aa, synthetic construct
  REGION 1..7: note = Synthetic Peptide
PPPCPRC

SEQ ID NO: 4780 - protein, 7 aa, synthetic construct
  REGION 1..7: note = Synthetic Peptide
PPCPRCP

SEQ ID NO: 4781 - protein, 7 aa, synthetic construct
  REGION 1..7: note = Synthetic Peptide
PCPRCPE

SEQ ID NO: 4782 - protein, 7 aa, synthetic construct
  REGION 1..7: note = Synthetic Peptide
CPRCPEP

SEQ ID NO: 4783 - protein, 7 aa, synthetic construct
  REGION 1..7: note = Synthetic Peptide
PRCPEPK

SEQ ID NO: 4784 - protein, 7 aa, synthetic construct
  REGION 1..7: note = Synthetic Peptide
RCPEPKS

SEQ ID NO: 4785 - protein, 7 aa, synthetic construct
  REGION 1..7: note = Synthetic Peptide
CPEPKSC

SEQ ID NO: 4786 - protein, 7 aa, synthetic construct
  REGION 1..7: note = Synthetic Peptide
PEPKSCD

SEQ ID NO: 4787 - protein, 7 aa, synthetic construct
  REGION 1..7: note = Synthetic Peptide
EPKSCDT

SEQ ID NO: 4788 - protein, 7 aa, synthetic construct
  REGION 1..7: note = Synthetic Peptide
PKSCDTP

SEQ ID NO: 4789 - protein, 7 aa, synthetic construct
  REGION 1..7: note = Synthetic Peptide
KSCDTPP

SEQ ID NO: 4790 - protein, 7 aa, synthetic construct
  REGION 1..7: note = Synthetic Peptide
SCDTPPP

SEQ ID NO: 4791 - protein, 7 aa, synthetic construct
  REGION 1..7: note = Synthetic Peptide
CDTPPPC

SEQ ID NO: 4792 - protein, 7 aa, synthetic construct
  REGION 1..7: note = Synthetic Peptide
DTPPPCP

SEQ ID NO: 4793 - protein, 7 aa, synthetic construct
  REGION 1..7: note = Synthetic Peptide
TPPPCPR

SEQ ID NO: 4794 - protein, 7 aa, synthetic construct
  REGION 1..7: note = Synthetic Peptide
PPPCPRC

SEQ ID NO: 4795 - protein, 7 aa, synthetic construct
  REGION 1..7: note = Synthetic Peptide
PPCPRCP

SEQ ID NO: 4796 - protein, 7 aa, synthetic construct
  REGION 1..7: note = Synthetic Peptide
PCPRCPE

SEQ ID NO: 4797 - protein, 7 aa, synthetic construct
  REGION 1..7: note = Synthetic Peptide
CPRCPEP

SEQ ID NO: 4798 - protein, 7 aa, synthetic construct
  REGION 1..7: note = Synthetic Peptide
PRCPEPK

SEQ ID NO: 4799 - protein, 7 aa, synthetic construct
  REGION 1..7: note = Synthetic Peptide
RCPEPKS

SEQ ID NO: 4800 - protein, 7 aa, synthetic construct
  REGION 1..7: note = Synthetic Peptide
CPEPKSC

SEQ ID NO: 4801 - protein, 7 aa, synthetic construct
  REGION 1..7: note = Synthetic Peptide
PEPKSCD

SEQ ID NO: 4802 - protein, 7 aa, synthetic construct
  REGION 1..7: note = Synthetic Peptide
EPKSCDT

SEQ ID NO: 4803 - protein, 7 aa, synthetic construct
  REGION 1..7: note = Synthetic Peptide
PKSCDTP

SEQ ID NO: 4804 - protein, 7 aa, synthetic construct
  REGION 1..7: note = Synthetic Peptide
KSCDTPP

SEQ ID NO: 4805 - protein, 7 aa, synthetic construct
  REGION 1..7: note = Synthetic Peptide
SCDTPPP

SEQ ID NO: 4806 - protein, 7 aa, synthetic construct
  REGION 1..7: note = Synthetic Peptide
CDTPPPC

SEQ ID NO: 4807 - protein, 7 aa, synthetic construct
  REGION 1..7: note = Synthetic Peptide
DTPPPCP

SEQ ID NO: 4808 - protein, 7 aa, synthetic construct
  REGION 1..7: note = Synthetic Peptide
TPPPCPR

SEQ ID NO: 4809 - protein, 7 aa, synthetic construct
  REGION 1..7: note = Synthetic Peptide
PPPCPRC

SEQ ID NO: 4810 - protein, 7 aa, synthetic construct
  REGION 1..7: note = Synthetic Peptide
PPCPRCP

SEQ ID NO: 4811 - protein, 64 aa, synthetic construct
  REGION 1..64: note = Synthetic Peptide
ELKTPLGDTTHTCPRCPEPKSCDTPPPCPRCPEPKSCDTPPPCPRCPEPKSCDTPPPCPRCPAP

SEQ ID NO: 4812 - protein, 18 aa, synthetic construct
  REGION 1..18: note = Synthetic Peptide
  REGION 1..18: note = misc_feature - the entire sequence can be repeated 1 to 10 times
  SITE 2: note = misc_feature - Wherein Xaa is Leu or Pro
  SITE 4: note = misc_feature - Wherein Xaa is Thr or Ser
  SITE 5: note = misc_feature - Wherein Xaa is Pro or Cys
  SITE 6: note = misc_feature - Wherein Xaa is Leu or none
  SITE 7: note = misc_feature - Wherein Xaa is Gly or none
  SITE 10: note = misc_feature - Wherein Xaa is Thr or Pro
  SITE 11: note = misc_feature - Wherein Xaa is His or Pro
  SITE 12: note = misc_feature - Wherein Xaa is Thr or Pro
  SITE 12: note = misc_feature - Wherein Xaa is Thr or Pro
EXKXXXXDTXXXTCPRCP

SEQ ID NO: 4813-4816 - skipped (4 entries)

SEQ ID NO: 4817 - protein, 4 aa, synthetic construct
  REGION 1..4: note = Synthetic Peptide
GGGG

SEQ ID NO: 4818 - protein, 5 aa, synthetic construct
  REGION 1..5: note = Synthetic Peptide
GGGSG

SEQ ID NO: 4819 - protein, 5 aa, synthetic construct
  REGION 1..5: note = Synthetic Peptide
  REGION 1..5: note = misc_feature - the entire sequence can be repeated 1 to 100 times
GGGSG

SEQ ID NO: 4820 - protein, 5 aa, synthetic construct
  REGION 1..5: note = Synthetic Peptide
  REGION 1..5: note = misc_feature - the entire sequence can be repeated 1 to 100 times
GGGGS

SEQ ID NO: 4821 - protein, 4 aa, synthetic construct
  REGION 1..4: note = Synthetic Peptide
  REGION 1..4: note = misc_feature - the entire sequence can be repeated 1 to 100 times
GGGS

SEQ ID NO: 4822 - skipped

SEQ ID NO: 4823 - protein, 6 aa, synthetic construct
  REGION 1..6: note = Synthetic Peptide
GSGSGS

SEQ ID NO: 4824 - protein, 5 aa, synthetic construct
  REGION 1..5: note = Synthetic Peptide
GGSGG

SEQ ID NO: 4825 - protein, 7 aa, synthetic construct
  REGION 1..7: note = Synthetic Peptide
SGGSGGS

SEQ ID NO: 4826 - protein, 15 aa, synthetic construct
  REGION 1..15: note = Synthetic Peptide
GGSGGSGGSGGSGGG

SEQ ID NO: 4827 - protein, 16 aa, synthetic construct
  REGION 1..16: note = Synthetic Peptide
GGSGGSGGGGSGGGGS

SEQ ID NO: 4828 - protein, 18 aa, synthetic construct
  REGION 1..18: note = Synthetic Peptide
GGSGGSGGSGGSGGSGGS

SEQ ID NO: 4829 - protein, 15 aa, synthetic construct
  REGION 1..15: note = Synthetic Peptide
GGGGSGGGGSGGGGS

SEQ ID NO: 4830 - protein, 9 aa, synthetic construct
  REGION 1..9: note = Synthetic Peptide
KPCPPCKCP

SEQ ID NO: 4831 - protein, 11 aa, synthetic construct
  REGION 1..11: note = Synthetic Peptide
KPCPPCKCPAP

SEQ ID NO: 4832 - protein, 15 aa, synthetic construct
  REGION 1..15: note = Synthetic Peptide
GPTIKPCPPCKCPAP

SEQ ID NO: 4833 - protein, 64 aa, synthetic construct; identical to SEQ ID NO: 4811
  REGION 1..64: note = Synthetic Peptide

SEQ ID NO: 4834 - protein, 52 aa, synthetic construct; identical to SEQ ID NO: 4750
  REGION 1..52: note = Synthetic Peptide

SEQ ID NO: 4835 - protein, 47 aa, synthetic construct; identical to SEQ ID NO: 4751
  REGION 1..47: note = Synthetic Peptide

SEQ ID NO: 4836 - protein, 32 aa, synthetic construct; identical to SEQ ID NO: 4752
  REGION 1..32: note = Synthetic Peptide

SEQ ID NO: 4837 - protein, 22 aa, synthetic construct
  REGION 1..22: note = Synthetic Peptide
CPRCPEPKSCDTPPPCPRCPAP

SEQ ID NO: 4838 - protein, 17 aa, synthetic construct
  REGION 1..17: note = Synthetic Peptide
EPKSCDTPPPCPRCPAP

SEQ ID NO: 4839 - protein, 17 aa, synthetic construct
  REGION 1..17: note = Synthetic Peptide
EPKSCDKTHTCPPCPAP

SEQ ID NO: 4840 - protein, 16 aa, synthetic construct
  REGION 1..16: note = Synthetic Peptide
PKSCDKTHTCPPCPAP

SEQ ID NO: 4841 - protein, 8 aa, synthetic construct
  REGION 1..8: note = Synthetic Peptide
PCPRCPAP

SEQ ID NO: 4842 - protein, 11 aa, synthetic construct
  REGION 1..11: note = Synthetic Peptide
PCPAPPVAGPS

SEQ ID NO: 4843 - protein, 7 aa, synthetic construct
  REGION 1..7: note = Synthetic Peptide
PPKPKDT

SEQ ID NO: 4844 - protein, 28 aa, synthetic construct
  REGION 1..28: note = Synthetic Peptide
TVPCPVPSTPPTPSPSTPPTPSPSCCHP

SEQ ID NO: 4845 - protein, 10 aa, synthetic construct
  REGION 1..10: note = Synthetic Peptide
TVPCPVPSTP

SEQ ID NO: 4846 - protein, 10 aa, synthetic construct
  REGION 1..10: note = Synthetic Peptide
TPSPSTPPTP

SEQ ID NO: 4847 - protein, 9 aa, synthetic construct
  REGION 1..9: note = Synthetic Peptide
TPSPSCCHP

SEQ ID NO: 4848 - protein, 15 aa, synthetic construct
  REGION 1..15: note = Synthetic Peptide
VPCPVPPPPPCCHPR

SEQ ID NO: 4849 - protein, 7 aa, synthetic construct
  REGION 1..7: note = Synthetic Peptide
VPCPVPP

SEQ ID NO: 4850 - protein, 7 aa, synthetic construct
  REGION 1..7: note = Synthetic Peptide
PPPCCHP

SEQ ID NO: 4851 - protein, 13 aa, synthetic construct
  REGION 1..13: note = Synthetic Peptide
PCPVPPPPPCCHP

SEQ ID NO: 4852 - protein, 77 aa, synthetic construct; identical to SEQ ID NO: 1
  REGION 1..77: note = Synthetic Peptide

SEQ ID NO: 4853 - protein, 19 aa, synthetic construct
  REGION 1..19: note = Synthetic Peptide
KTPECPSHTQPLGVYLLTP

SEQ ID NO: 4854 - protein, 17 aa, synthetic construct
  REGION 1..17: note = Synthetic Peptide
PECPSHTQPLGVYLLTP

SEQ ID NO: 4855 - protein, 14 aa, synthetic construct
  REGION 1..14: note = Synthetic Peptide
RWPESPKAQASSVP

SEQ ID NO: 4856 - protein, 10 aa, synthetic construct
  REGION 1..10: note = Synthetic Peptide
SVCSRDFTPP

SEQ ID NO: 4857 - protein, 26 aa, synthetic construct
  REGION 1..26: note = Synthetic Peptide
PLPVIAELPPKVSVFVPPRDGFFGNP

SEQ ID NO: 4858 - protein, 10 aa, synthetic construct
  REGION 1..10: note = Synthetic Peptide
PLPVIAELPP

SEQ ID NO: 4859 - protein, 12 aa, synthetic construct
  REGION 1..12: note = Synthetic Peptide
ELPPKVSVFVPP

SEQ ID NO: 4860 - protein, 13 aa, synthetic construct
  REGION 1..13: note = Synthetic Peptide
EPRGPTIKPCPPC

SEQ ID NO: 4861 - protein, 5 aa, synthetic construct
  REGION 1..5: note = Synthetic Peptide
VDKKI

SEQ ID NO: 4862 - protein, 5 aa, synthetic construct
  REGION 1..5: note = Synthetic Peptide
KCPAP

SEQ ID NO: 4863 - protein, 6 aa, synthetic construct
  REGION 1..6: note = Synthetic Peptide
KPCPPC

SEQ ID NO: 4864 - protein, 839 aa, synthetic construct
  REGION 1..839: note = Synthetic Peptide
MLLLVTSLLLCELPHPAFLLIPDIQMTQTTSSLSASLGDRVTISCRASQDISKYLNWYQQKPDGTVKLLIYHTSRLHSGVPSRFSGSGSGTDYSLTISNLEQEDIATYFCQQGNTLPYTFGGGTKLEITGSTSGSGKPGSGEGSTKGEVKLQESGPGLVAPSQSLSVTCTVSGVSLPDYGVSWIRQPPRKGLEWLGVIWGSETTYYNSALKSRLTIIKDNSKSQVFLKMNSLQTDDTAIYYCAKHYYYGGSYAMDYWGQGTSVTVSSESKYGPPCPPCPMFWVLVVVGGVLACYSLLVTVAFIIFWVKRGRKKLLYIFKQPFMRPVQTTQEEDGCSCRFPEEEEGGCELRVKFSRSADAPAYQQGQNQLYNELNLGRREEYDVLDKRRGRDPEMGGKPRRKNPQEGLYNELQKDKMAEAYSEIGMKGERRRGKGHDGLYQGLSTATKDTYDALHMQALPPRSGATNFSLLKQAGDVEENPGPMLLLVTSLLLCELPHPAFLLIPRKVCNGIGIGEFKDSLSINATNIKHFKNCTSISGDLHILPVAFRGDSFTHTPPLDPQELDILKTVKEITGFLLIQAWPENRTDLHAFENLEIIRGRTKQHGQFSLAVVSLNITSLGLRSLKEISDGDVIISGNKNLCYANTINWKKLFGTSGQKTKIISNRGENSCKATGQVCHALCSPEGCWGPEPRDCVSCRNVSRGRECVDKCNLLEGEPREFVENSECIQCHPECLPQAMNITCTGRGPDNCIQCAHYIDGPHCVKTCPAGVMGENNTLVWKYADAGHVCHLCHPNCTYGCTGPGLEGCPTNGPKIPSIATGMVGALLLLLVVALGIGLFM

SEQ ID NO: 4865 - protein, 22 aa, synthetic construct
  REGION 1..22: note = Synthetic Peptide
MLLLVTSLLLCELPHPAFLLIP

SEQ ID NO: 4866 - protein, 245 aa, synthetic construct
  REGION 1..245: note = Synthetic Peptide
DIQMTQTTSSLSASLGDRVTISCRASQDISKYLNWYQQKPDGTVKLLIYHTSRLHSGVPSRFSGSGSGTDYSLTISNLEQEDIATYFCQQGNTLPYTFGGGTKLEITGSTSGSGKPGSGEGSTKGEVKLQESGPGLVAPSQSLSVTCTVSGVSLPDYGVSWIRQPPRKGLEWLGVIWGSETTYYNSALKSRLTIIKDNSKSQVFLKMNSLQTDDTAIYYCAKHYYYGGSYAMDYWGQGTSVTVSS

SEQ ID NO: 4867 - protein, 12 aa, synthetic construct
  REGION 1..12: note = Synthetic Peptide
ESKYGPPCPPCP

SEQ ID NO: 4868 - protein, 28 aa, synthetic construct
  REGION 1..28: note = Synthetic Peptide
MFWVLVVVGGVLACYSLLVTVAFIIFWV

SEQ ID NO: 4869 - protein, 42 aa, synthetic construct
  REGION 1..42: note = Synthetic Peptide
KRGRKKLLYIFKQPFMRPVQTTQEEDGCSCRFPEEEEGGCEL

SEQ ID NO: 4870 - protein, 112 aa, synthetic construct
  REGION 1..112: note = Synthetic Peptide
RVKFSRSADAPAYQQGQNQLYNELNLGRREEYDVLDKRRGRDPEMGGKPRRKNPQEGLYNELQKDKMAEAYSEIGMKGERRRGKGHDGLYQGLSTATKDTYDALHMQALPPR

SEQ ID NO: 4871 - protein, 21 aa, synthetic construct
  REGION 1..21: note = Synthetic Peptide
SGATNFSLLKQAGDVEENPGP

SEQ ID NO: 4872 - protein, 357 aa, synthetic construct
  REGION 1..357: note = Synthetic Peptide
MLLLVTSLLLCELPHPAFLLIPRKVCNGIGIGEFKDSLSINATNIKHFKNCTSISGDLHILPVAFRGDSFTHTPPLDPQELDILKTVKEITGFLLIQAWPENRTDLHAFENLEIIRGRTKQHGQFSLAVVSLNITSLGLRSLKEISDGDVIISGNKNLCYANTINWKKLFGTSGQKTKIISNRGENSCKATGQVCHALCSPEGCWGPEPRDCVSCRNVSRGRECVDKCNLLEGEPREFVENSECIQCHPECLPQAMNITCTGRGPDNCIQCAHYIDGPHCVKTCPAGVMGENNTLVWKYADAGHVCHLCHPNCTYGCTGPGLEGCPTNGPKIPSIATGMVGALLLLLVVALGIGLFM

SEQ ID NO: 4873 - protein, 840 aa, synthetic construct
  REGION 1..840: note = Synthetic Peptide
MVLQTQVFISLLLWISGAYGQEQLVESGGRLVTPGGSLTLSCKASGFDFSAYYMSWVRQAPGKGLEWIATIYPSSGKTYYATWVNGRFTISSDNAQNTVDLQMNSLTAADRATYFCARDSYADDGALFNIWGPGTLVTISSGGGGSGGGGSGGGGSELVLTQSPSVSAALGSPAKITCTLSSAHKTDTIDWYQQLQGEAPRYLMQVQSDGSYTKRPGVPDRFSGSSSGADRYLIIPSVQADDEADYYCGADYIGGYVFGGGTQLTVTGESKYGPPCPPCPMFWVLVVVGGVLACYSLLVTVAFIIFWVKRGRKKLLYIFKQPFMRPVQTTQEEDGCSCRFPEEEEGGCELRVKFSRSADAPAYQQGQNQLYNELNLGRREEYDVLDKRRGRDPEMGGKPRRKNPQEGLYNELQKDKMAEAYSEIGMKGERRRGKGHDGLYQGLSTATKDTYDALHMQALPPRSGATNFSLLKQAGDVEENPGPMLLLVTSLLLCELPHPAFLLIPRKVCNGIGIGEFKDSLSINATNIKHFKNCTSISGDLHILPVAFRGDSFTHTPPLDPQELDILKTVKEITGFLLIQAWPENRTDLHAFENLEIIRGRTKQHGQFSLAVVSLNITSLGLRSLKEISDGDVIISGNKNLCYANTINWKKLFGTSGQKTKIISNRGENSCKATGQVCHALCSPEGCWGPEPRDCVSCRNVSRGRECVDKCNLLEGEPREFVENSECIQCHPECLPQAMNITCTGRGPDNCIQCAHYIDGPHCVKTCPAGVMGENNTLVWKYADAGHVCHLCHPNCTYGCTGPGLEGCPTNGPKIPSIATGMVGALLLLLVVALGIGLFM

SEQ ID NO: 4874 - protein, 20 aa, synthetic construct
  REGION 1..20: note = Synthetic Peptide
MVLQTQVFISLLLWISGAYG

SEQ ID NO: 4875 - protein, 248 aa, synthetic construct
  REGION 1..248: note = Synthetic Peptide
QEQLVESGGRLVTPGGSLTLSCKASGFDFSAYYMSWVRQAPGKGLEWIATIYPSSGKTYYATWVNGRFTISSDNAQNTVDLQMNSLTAADRATYFCARDSYADDGALFNIWGPGTLVTISSGGGGSGGGGSGGGGSELVLTQSPSVSAALGSPAKITCTLSSAHKTDTIDWYQQLQGEAPRYLMQVQSDGSYTKRPGVPDRFSGSSSGADRYLIIPSVQADDEADYYCGADYIGGYVFGGGTQLTVTG

SEQ ID NO: 4876 - protein, 12 aa, synthetic construct
  REGION 1..12: note = Synthetic Peptide
ESKYGPPCPPCP

SEQ ID NO: 4877 - protein, 28 aa, synthetic construct
  REGION 1..28: note = Synthetic Peptide
MFWVLVVVGGVLACYSLLVTVAFIIFWV

SEQ ID NO: 4878 - protein, 42 aa, synthetic construct; identical to SEQ ID NO: 4869
  REGION 1..42: note = Synthetic Peptide

SEQ ID NO: 4879 - protein, 112 aa, synthetic construct; identical to SEQ ID NO: 4870
  REGION 1..112: note = Synthetic Peptide

SEQ ID NO: 4880 - protein, 21 aa, synthetic construct
  REGION 1..21: note = Synthetic Peptide
SGATNFSLLKQAGDVEENPGP

SEQ ID NO: 4881 - protein, 357 aa, synthetic construct; identical to SEQ ID NO: 4872
  REGION 1..357: note = Synthetic Peptide

SEQ ID NO: 4882 - protein, 14 aa, synthetic construct
  REGION 1..14: note = Synthetic Peptide
KPCPPCKCPGGGSG

SEQ ID NO: 4883 - protein, 14 aa, synthetic construct
  REGION 1..14: note = Synthetic Peptide
GGGSGKPCPPCKCP

SEQ ID NO: 4884 - protein, 19 aa, synthetic construct
  REGION 1..19: note = Synthetic Peptide
GGGSGKPCPPCKCPGGGSG

SEQ ID NO: 4885 - protein, 18 aa, synthetic construct
  REGION 1..18: note = Synthetic Peptide
GSTSGSGKPGSGEGSTKG

SEQ ID NO: 4886 - protein, 15 aa, synthetic construct
  REGION 1..15: note = Synthetic Peptide
GSTSGSGKPGSGEGS

SEQ ID NO: 4887 - protein, 116 aa, synthetic construct
  REGION 1..116: note = Synthetic Peptide
QSVKESEGDLVTPAGNLTLTCTASGSDINDYPISWVRQAPGKGLEWIGFINSGGSTWYASWVKGRFTISRTSTTVDLKMTSLTTDDTATYFCARGYSTYYCDFNIWGPGTLVTISS

SEQ ID NO: 4888 - protein, 5 aa, synthetic construct
  REGION 1..5: note = Synthetic Peptide
DYPIS

SEQ ID NO: 4889 - protein, 16 aa, synthetic construct
  REGION 1..16: note = Synthetic Peptide
FINSGGSTWYASWVKG

SEQ ID NO: 4890 - protein, 11 aa, synthetic construct
  REGION 1..11: note = Synthetic Peptide
GYSTYYCDFNI

SEQ ID NO: 4891 - protein, 110 aa, synthetic construct
  REGION 1..110: note = Synthetic Peptide
ELVMTQTPSSTSGAVGGTVTINCQASQSIDSNLAWFQQKPGQPPTLLIYRASNLASGVPSRFSGSRSGTEYTLTISGVQREDAATYYCLGGVGNVSYRTSFGGGTEVVVK

SEQ ID NO: 4892 - protein, 11 aa, synthetic construct
  REGION 1..11: note = Synthetic Peptide
QASQSIDSNLA

SEQ ID NO: 4893 - protein, 7 aa, synthetic construct
  REGION 1..7: note = Synthetic Peptide
RASNLAS

SEQ ID NO: 4894 - protein, 12 aa, synthetic construct
  REGION 1..12: note = Synthetic Peptide
LGGVGNVSYRTS

SEQ ID NO: 4895 - protein, 121 aa, synthetic construct
  REGION 1..121: note = Synthetic Peptide
QEQLVESGGRLVTPGGSLTLSCKASGFDFSAYYMSWVRQAPGKGLEWIATIYPSSGKTYYATWVNGRFTISSDNAQNTVDLQMNSLTAADRATYFCARDSYADDGALFNIWGPGTLVTISS

SEQ ID NO: 4896 - protein, 5 aa, synthetic construct
  REGION 1..5: note = Synthetic Peptide
AYYMS

SEQ ID NO: 4897 - protein, 17 aa, synthetic construct
  REGION 1..17: note = Synthetic Peptide
TIYPSSGKTYYATWVNG

SEQ ID NO: 4898 - protein, 12 aa, synthetic construct
  REGION 1..12: note = Synthetic Peptide
DSYADDGALFNI

SEQ ID NO: 4899 - protein, 112 aa, synthetic construct
  REGION 1..112: note = Synthetic Peptide
ELVLTQSPSVSAALGSPAKITCTLSSAHKTDTIDWYQQLQGEAPRYLMQVQSDGSYTKRPGVPDRFSGSSSGADRYLIIPSVQADDEADYYCGADYIGGYVFGGGTQLTVTG

SEQ ID NO: 4900 - protein, 12 aa, synthetic construct
  REGION 1..12: note = Synthetic Peptide
TLSSAHKTDTID

SEQ ID NO: 4901 - protein, 7 aa, synthetic construct
  REGION 1..7: note = Synthetic Peptide
GSYTKRP

SEQ ID NO: 4902 - protein, 9 aa, synthetic construct
  REGION 1..9: note = Synthetic Peptide
GADYIGGYV

SEQ ID NO: 4903 - protein, 118 aa, synthetic construct
  REGION 1..118: note = Synthetic Peptide
QVQLQQSGAELVRPGASVTLSCKASGYTFSDYEMHWVIQTPVHGLEWIGAIDPETGGTAYNQKFKGKAILTADKSSSTAYMELRSLTSEDSAVYYCTGYYDYDSFTYWGQGTLVTVSA

SEQ ID NO: 4904 - protein, 5 aa, synthetic construct
  REGION 1..5: note = Synthetic Peptide
DYEMH

SEQ ID NO: 4905 - protein, 17 aa, synthetic construct
  REGION 1..17: note = Synthetic Peptide
AIDPETGGTAYNQKFKG

SEQ ID NO: 4906 - protein, 9 aa, synthetic construct
  REGION 1..9: note = Synthetic Peptide
YYDYDSFTY

SEQ ID NO: 4907 - protein, 107 aa, synthetic construct
  REGION 1..107: note = Synthetic Peptide
DIVMTQSQKIMSTTVGDRVSITCKASQNVDAAVAWYQQKPGQSPKLLIYSASNRYTGVPDRFTGSGSGTDFTLTISNMQSEDLADYFCQQYDIYPYTFGGGTKLEIK

SEQ ID NO: 4908 - protein, 11 aa, synthetic construct
  REGION 1..11: note = Synthetic Peptide
KASQNVDAAVA

SEQ ID NO: 4909 - protein, 7 aa, synthetic construct
  REGION 1..7: note = Synthetic Peptide
SASNRYT

SEQ ID NO: 4910 - protein, 9 aa, synthetic construct
  REGION 1..9: note = Synthetic Peptide
QQYDIYPYT

SEQ ID NO: 4911 - protein, 12 aa, synthetic construct
  REGION 1..12: note = Synthetic Peptide
ESKYGPPCPPCP

SEQ ID NO: 4912 - protein, 119 aa, synthetic construct
  REGION 1..119: note = Synthetic Peptide
ESKYGPPCPPCPGQPREPQVYTLPPSQEEMTKNQVSLTCLVKGFYPSDIAVEWESNGQPENNYKTTPPVLDSDGSFFLYSRLTVDKSRWQEGNVFSCSVMHEALHNHYTQKSLSLSLGK

SEQ ID NO: 4913 - protein, 228 aa, synthetic construct
  REGION 1..228: note = Synthetic Peptide
ESKYGPPCPPCPAPPVAGPSVFLFPPKPKDTLMISRTPEVTCVVVDVSQEDPEVQFNWYVDGVEVHNAKTKPREEQFQSTYRVVSVLTVLHQDWLNGKEYKCKVSNKGLPSSIEKTISKAKGQPREPQVYTLPPSQEEMTKNQVSLTCLVKGFYPSDIAVEWESNGQPENNYKTTPPVLDSDGSFFLYSRLTVDKSRWQEGNVFSCSVMHEALHNHYTQKSLSLSLGK

SEQ ID NO: 4914 - protein, 836 aa, synthetic construct
  REGION 1..836: note = Synthetic Peptide
MLLLVTSLLLCELPHPAFLLIPDIQMTQTTSSLSASLGDRVTISCRASQDISKYLNWYQQKPDGTVKLLIYHTSRLHSGVPSRFSGSGSGTDYSLTISNLEQEDIATYFCQQGNTLPYTFGGGTKLEITGSTSGSGKPGSGEGSTKGEVKLQESGPGLVAPSQSLSVTCTVSGVSLPDYGVSWIRQPPRKGLEWLGVIWGSETTYYNSALKSRLTIIKDNSKSQVFLKMNSLQTDDTAIYYCAKHYYYGGSYAMDYWGQGTSVTVSSKPCPPCKCPMFWVLVVVGGVLACYSLLVTVAFIIFWVKRGRKKLLYIFKQPFMRPVQTTQEEDGCSCRFPEEEEGGCELRVKFSRSADAPAYQQGQNQLYNELNLGRREEYDVLDKRRGRDPEMGGKPRRKNPQEGLYNELQKDKMAEAYSEIGMKGERRRGKGHDGLYQGLSTATKDTYDALHMQALPPRSGATNFSLLKQAGDVEENPGPMLLLVTSLLLCELPHPAFLLIPRKVCNGIGIGEFKDSLSINATNIKHFKNCTSISGDLHILPVAFRGDSFTHTPPLDPQELDILKTVKEITGFLLIQAWPENRTDLHAFENLEIIRGRTKQHGQFSLAVVSLNITSLGLRSLKEISDGDVIISGNKNLCYANTINWKKLFGTSGQKTKIISNRGENSCKATGQVCHALCSPEGCWGPEPRDCVSCRNVSRGRECVDKCNLLEGEPREFVENSECIQCHPECLPQAMNITCTGRGPDNCIQCAHYIDGPHCVKTCPAGVMGENNTLVWKYADAGHVCHLCHPNCTYGCTGPGLEGCPTNGPKIPSIATGMVGALLLLLVVALGIGLFM

SEQ ID NO: 4915 - protein, 843 aa, synthetic construct
  REGION 1..843: note = Synthetic Peptide
MLLLVTSLLLCELPHPAFLLIPDIQMTQTTSSLSASLGDRVTISCRASQDISKYLNWYQQKPDGTVKLLIYHTSRLHSGVPSRFSGSGSGTDYSLTISNLEQEDIATYFCQQGNTLPYTFGGGTKLEITGSTSGSGKPGSGEGSTKGEVKLQESGPGLVAPSQSLSVTCTVSGVSLPDYGVSWIRQPPRKGLEWLGVIWGSETTYYNSALKSRLTIIKDNSKSQVFLKMNSLQTDDTAIYYCAKHYYYGGSYAMDYWGQGTSVTVSSPKSCDKTHTCPPCPAPMFWVLVVVGGVLACYSLLVTVAFIIFWVKRGRKKLLYIFKQPFMRPVQTTQEEDGCSCRFPEEEEGGCELRVKFSRSADAPAYQQGQNQLYNELNLGRREEYDVLDKRRGRDPEMGGKPRRKNPQEGLYNELQKDKMAEAYSEIGMKGERRRGKGHDGLYQGLSTATKDTYDALHMQALPPRSGATNFSLLKQAGDVEENPGPMLLLVTSLLLCELPHPAFLLIPRKVCNGIGIGEFKDSLSINATNIKHFKNCTSISGDLHILPVAFRGDSFTHTPPLDPQELDILKTVKEITGFLLIQAWPENRTDLHAFENLEIIRGRTKQHGQFSLAVVSLNITSLGLRSLKEISDGDVIISGNKNLCYANTINWKKLFGTSGQKTKIISNRGENSCKATGQVCHALCSPEGCWGPEPRDCVSCRNVSRGRECVDKCNLLEGEPREFVENSECIQCHPECLPQAMNITCTGRGPDNCIQCAHYIDGPHCVKTCPAGVMGENNTLVWKYADAGHVCHLCHPNCTYGCTGPGLEGCPTNGPKIPSIATGMVGALLLLLVVALGIGLFM

SEQ ID NO: 4916 - protein, 835 aa, synthetic construct
  REGION 1..835: note = Synthetic Peptide
MLLLVTSLLLCELPHPAFLLIPDIQMTQTTSSLSASLGDRVTISCRASQDISKYLNWYQQKPDGTVKLLIYHTSRLHSGVPSRFSGSGSGTDYSLTISNLEQEDIATYFCQQGNTLPYTFGGGTKLEITGSTSGSGKPGSGEGSTKGEVKLQESGPGLVAPSQSLSVTCTVSGVSLPDYGVSWIRQPPRKGLEWLGVIWGSETTYYNSALKSRLTIIKDNSKSQVFLKMNSLQTDDTAIYYCAKHYYYGGSYAMDYWGQGTSVTVSSPCPRCPAPMFWVLVVVGGVLACYSLLVTVAFIIFWVKRGRKKLLYIFKQPFMRPVQTTQEEDGCSCRFPEEEEGGCELRVKFSRSADAPAYQQGQNQLYNELNLGRREEYDVLDKRRGRDPEMGGKPRRKNPQEGLYNELQKDKMAEAYSEIGMKGERRRGKGHDGLYQGLSTATKDTYDALHMQALPPRSGATNFSLLKQAGDVEENPGPMLLLVTSLLLCELPHPAFLLIPRKVCNGIGIGEFKDSLSINATNIKHFKNCTSISGDLHILPVAFRGDSFTHTPPLDPQELDILKTVKEITGFLLIQAWPENRTDLHAFENLEIIRGRTKQHGQFSLAVVSLNITSLGLRSLKEISDGDVIISGNKNLCYANTINWKKLFGTSGQKTKIISNRGENSCKATGQVCHALCSPEGCWGPEPRDCVSCRNVSRGRECVDKCNLLEGEPREFVENSECIQCHPECLPQAMNITCTGRGPDNCIQCAHYIDGPHCVKTCPAGVMGENNTLVWKYADAGHVCHLCHPNCTYGCTGPGLEGCPTNGPKIPSIATGMVGALLLLLVVALGIGLFM

SEQ ID NO: 4917 - protein, 838 aa, synthetic construct
  REGION 1..838: note = Synthetic Peptide
MLLLVTSLLLCELPHPAFLLIPDIQMTQTTSSLSASLGDRVTISCRASQDISKYLNWYQQKPDGTVKLLIYHTSRLHSGVPSRFSGSGSGTDYSLTISNLEQEDIATYFCQQGNTLPYTFGGGTKLEITGSTSGSGKPGSGEGSTKGEVKLQESGPGLVAPSQSLSVTCTVSGVSLPDYGVSWIRQPPRKGLEWLGVIWGSETTYYNSALKSRLTIIKDNSKSQVFLKMNSLQTDDTAIYYCAKHYYYGGSYAMDYWGQGTSVTVSSPCPAPPVAGPSMFWVLVVVGGVLACYSLLVTVAFIIFWVKRGRKKLLYIFKQPFMRPVQTTQEEDGCSCRFPEEEEGGCELRVKFSRSADAPAYQQGQNQLYNELNLGRREEYDVLDKRRGRDPEMGGKPRRKNPQEGLYNELQKDKMAEAYSEIGMKGERRRGKGHDGLYQGLSTATKDTYDALHMQALPPRSGATNFSLLKQAGDVEENPGPMLLLVTSLLLCELPHPAFLLIPRKVCNGIGIGEFKDSLSINATNIKHFKNCTSISGDLHILPVAFRGDSFTHTPPLDPQELDILKTVKEITGFLLIQAWPENRTDLHAFENLEIIRGRTKQHGQFSLAVVSLNITSLGLRSLKEISDGDVIISGNKNLCYANTINWKKLFGTSGQKTKIISNRGENSCKATGQVCHALCSPEGCWGPEPRDCVSCRNVSRGRECVDKCNLLEGEPREFVENSECIQCHPECLPQAMNITCTGRGPDNCIQCAHYIDGPHCVKTCPAGVMGENNTLVWKYADAGHVCHLCHPNCTYGCTGPGLEGCPTNGPKIPSIATGMVGALLLLLVVALGIGLFM

SEQ ID NO: 4918 - protein, 860 aa, synthetic construct
  REGION 1..860: note = Synthetic Peptide
MVLQTQVFISLLLWISGAYGQEQLVESGGRLVTPGGSLTLSCKASGFDFSAYYMSWVRQAPGKGLEWIATIYPSSGKTYYATWVNGRFTISSDNAQNTVDLQMNSLTAADRATYFCARDSYADDGALFNIWGPGTLVTISSGGGGSGGGGSGGGGSELVLTQSPSVSAALGSPAKITCTLSSAHKTDTIDWYQQLQGEAPRYLMQVQSDGSYTKRPGVPDRFSGSSSGADRYLIIPSVQADDEADYYCGADYIGGYVFGGGTQLTVTGEPKSCDTPPPCPRCPEPKSCDTPPPCPRCPAPMFWVLVVVGGVLACYSLLVTVAFIIFWVKRGRKKLLYIFKQPFMRPVQTTQEEDGCSCRFPEEEEGGCELRVKFSRSADAPAYQQGQNQLYNELNLGRREEYDVLDKRRGRDPEMGGKPRRKNPQEGLYNELQKDKMAEAYSEIGMKGERRRGKGHDGLYQGLSTATKDTYDALHMQALPPRSGATNFSLLKQAGDVEENPGPMLLLVTSLLLCELPHPAFLLIPRKVCNGIGIGEFKDSLSINATNIKHFKNCTSISGDLHILPVAFRGDSFTHTPPLDPQELDILKTVKEITGFLLIQAWPENRTDLHAFENLEIIRGRTKQHGQFSLAVVSLNITSLGLRSLKEISDGDVIISGNKNLCYANTINWKKLFGTSGQKTKIISNRGENSCKATGQVCHALCSPEGCWGPEPRDCVSCRNVSRGRECVDKCNLLEGEPREFVENSECIQCHPECLPQAMNITCTGRGPDNCIQCAHYIDGPHCVKTCPAGVMGENNTLVWKYADAGHVCHLCHPNCTYGCTGPGLEGCPTNGPKIPSIATGMVGALLLLLVVALGIGLFM

SEQ ID NO: 4919 - protein, 850 aa, synthetic construct
  REGION 1..850: note = Synthetic Peptide
MVLQTQVFISLLLWISGAYGQEQLVESGGRLVTPGGSLTLSCKASGFDFSAYYMSWVRQAPGKGLEWIATIYPSSGKTYYATWVNGRFTISSDNAQNTVDLQMNSLTAADRATYFCARDSYADDGALFNIWGPGTLVTISSGGGGSGGGGSGGGGSELVLTQSPSVSAALGSPAKITCTLSSAHKTDTIDWYQQLQGEAPRYLMQVQSDGSYTKRPGVPDRFSGSSSGADRYLIIPSVQADDEADYYCGADYIGGYVFGGGTQLTVTGCPRCPEPKSCDTPPPCPRCPAPMFWVLVVVGGVLACYSLLVTVAFIIFWVKRGRKKLLYIFKQPFMRPVQTTQEEDGCSCRFPEEEEGGCELRVKFSRSADAPAYQQGQNQLYNELNLGRREEYDVLDKRRGRDPEMGGKPRRKNPQEGLYNELQKDKMAEAYSEIGMKGERRRGKGHDGLYQGLSTATKDTYDALHMQALPPRSGATNFSLLKQAGDVEENPGPMLLLVTSLLLCELPHPAFLLIPRKVCNGIGIGEFKDSLSINATNIKHFKNCTSISGDLHILPVAFRGDSFTHTPPLDPQELDILKTVKEITGFLLIQAWPENRTDLHAFENLEIIRGRTKQHGQFSLAVVSLNITSLGLRSLKEISDGDVIISGNKNLCYANTINWKKLFGTSGQKTKIISNRGENSCKATGQVCHALCSPEGCWGPEPRDCVSCRNVSRGRECVDKCNLLEGEPREFVENSECIQCHPECLPQAMNITCTGRGPDNCIQCAHYIDGPHCVKTCPAGVMGENNTLVWKYADAGHVCHLCHPNCTYGCTGPGLEGCPTNGPKIPSIATGMVGALLLLLVVALGIGLFM

SEQ ID NO: 4920 - protein, 845 aa, synthetic construct
  REGION 1..845: note = Synthetic Peptide
MVLQTQVFISLLLWISGAYGQEQLVESGGRLVTPGGSLTLSCKASGFDFSAYYMSWVRQAPGKGLEWIATIYPSSGKTYYATWVNGRFTISSDNAQNTVDLQMNSLTAADRATYFCARDSYADDGALFNIWGPGTLVTISSGGGGSGGGGSGGGGSELVLTQSPSVSAALGSPAKITCTLSSAHKTDTIDWYQQLQGEAPRYLMQVQSDGSYTKRPGVPDRFSGSSSGADRYLIIPSVQADDEADYYCGADYIGGYVFGGGTQLTVTGEPKSCDTPPPCPRCPAPMFWVLVVVGGVLACYSLLVTVAFIIFWVKRGRKKLLYIFKQPFMRPVQTTQEEDGCSCRFPEEEEGGCELRVKFSRSADAPAYQQGQNQLYNELNLGRREEYDVLDKRRGRDPEMGGKPRRKNPQEGLYNELQKDKMAEAYSEIGMKGERRRGKGHDGLYQGLSTATKDTYDALHMQALPPRSGATNFSLLKQAGDVEENPGPMLLLVTSLLLCELPHPAFLLIPRKVCNGIGIGEFKDSLSINATNIKHFKNCTSISGDLHILPVAFRGDSFTHTPPLDPQELDILKTVKEITGFLLIQAWPENRTDLHAFENLEIIRGRTKQHGQFSLAVVSLNITSLGLRSLKEISDGDVIISGNKNLCYANTINWKKLFGTSGQKTKIISNRGENSCKATGQVCHALCSPEGCWGPEPRDCVSCRNVSRGRECVDKCNLLEGEPREFVENSECIQCHPECLPQAMNITCTGRGPDNCIQCAHYIDGPHCVKTCPAGVMGENNTLVWKYADAGHVCHLCHPNCTYGCTGPGLEGCPTNGPKIPSIATGMVGALLLLLVVALGIGLFM

SEQ ID NO: 4921 - protein, 845 aa, synthetic construct
  REGION 1..845: note = Synthetic Peptide
MVLQTQVFISLLLWISGAYGQEQLVESGGRLVTPGGSLTLSCKASGFDFSAYYMSWVRQAPGKGLEWIATIYPSSGKTYYATWVNGRFTISSDNAQNTVDLQMNSLTAADRATYFCARDSYADDGALFNIWGPGTLVTISSGGGGSGGGGSGGGGSELVLTQSPSVSAALGSPAKITCTLSSAHKTDTIDWYQQLQGEAPRYLMQVQSDGSYTKRPGVPDRFSGSSSGADRYLIIPSVQADDEADYYCGADYIGGYVFGGGTQLTVTGEPKSCDKTHTCPPCPAPMFWVLVVVGGVLACYSLLVTVAFIIFWVKRGRKKLLYIFKQPFMRPVQTTQEEDGCSCRFPEEEEGGCELRVKFSRSADAPAYQQGQNQLYNELNLGRREEYDVLDKRRGRDPEMGGKPRRKNPQEGLYNELQKDKMAEAYSEIGMKGERRRGKGHDGLYQGLSTATKDTYDALHMQALPPRSGATNFSLLKQAGDVEENPGPMLLLVTSLLLCELPHPAFLLIPRKVCNGIGIGEFKDSLSINATNIKHFKNCTSISGDLHILPVAFRGDSFTHTPPLDPQELDILKTVKEITGFLLIQAWPENRTDLHAFENLEIIRGRTKQHGQFSLAVVSLNITSLGLRSLKEISDGDVIISGNKNLCYANTINWKKLFGTSGQKTKIISNRGENSCKATGQVCHALCSPEGCWGPEPRDCVSCRNVSRGRECVDKCNLLEGEPREFVENSECIQCHPECLPQAMNITCTGRGPDNCIQCAHYIDGPHCVKTCPAGVMGENNTLVWKYADAGHVCHLCHPNCTYGCTGPGLEGCPTNGPKIPSIATGMVGALLLLLVVALGIGLFM

SEQ ID NO: 4922 - protein, 844 aa, synthetic construct
  REGION 1..844: note = Synthetic Peptide
MVLQTQVFISLLLWISGAYGQEQLVESGGRLVTPGGSLTLSCKASGFDFSAYYMSWVRQAPGKGLEWIATIYPSSGKTYYATWVNGRFTISSDNAQNTVDLQMNSLTAADRATYFCARDSYADDGALFNIWGPGTLVTISSGGGGSGGGGSGGGGSELVLTQSPSVSAALGSPAKITCTLSSAHKTDTIDWYQQLQGEAPRYLMQVQSDGSYTKRPGVPDRFSGSSSGADRYLIIPSVQADDEADYYCGADYIGGYVFGGGTQLTVTGPKSCDKTHTCPPCPAPMFWVLVVVGGVLACYSLLVTVAFIIFWVKRGRKKLLYIFKQPFMRPVQTTQEEDGCSCRFPEEEEGGCELRVKFSRSADAPAYQQGQNQLYNELNLGRREEYDVLDKRRGRDPEMGGKPRRKNPQEGLYNELQKDKMAEAYSEIGMKGERRRGKGHDGLYQGLSTATKDTYDALHMQALPPRSGATNFSLLKQAGDVEENPGPMLLLVTSLLLCELPHPAFLLIPRKVCNGIGIGEFKDSLSINATNIKHFKNCTSISGDLHILPVAFRGDSFTHTPPLDPQELDILKTVKEITGFLLIQAWPENRTDLHAFENLEIIRGRTKQHGQFSLAVVSLNITSLGLRSLKEISDGDVIISGNKNLCYANTINWKKLFGTSGQKTKIISNRGENSCKATGQVCHALCSPEGCWGPEPRDCVSCRNVSRGRECVDKCNLLEGEPREFVENSECIQCHPECLPQAMNITCTGRGPDNCIQCAHYIDGPHCVKTCPAGVMGENNTLVWKYADAGHVCHLCHPNCTYGCTGPGLEGCPTNGPKIPSIATGMVGALLLLLVVALGIGLFM

SEQ ID NO: 4923 - protein, 839 aa, synthetic construct
  REGION 1..839: note = Synthetic Peptide
MVLQTQVFISLLLWISGAYGQEQLVESGGRLVTPGGSLTLSCKASGFDFSAYYMSWVRQAPGKGLEWIATIYPSSGKTYYATWVNGRFTISSDNAQNTVDLQMNSLTAADRATYFCARDSYADDGALFNIWGPGTLVTISSGGGGSGGGGSGGGGSELVLTQSPSVSAALGSPAKITCTLSSAHKTDTIDWYQQLQGEAPRYLMQVQSDGSYTKRPGVPDRFSGSSSGADRYLIIPSVQADDEADYYCGADYIGGYVFGGGTQLTVTGPCPAPPVAGPSMFWVLVVVGGVLACYSLLVTVAFIIFWVKRGRKKLLYIFKQPFMRPVQTTQEEDGCSCRFPEEEEGGCELRVKFSRSADAPAYQQGQNQLYNELNLGRREEYDVLDKRRGRDPEMGGKPRRKNPQEGLYNELQKDKMAEAYSEIGMKGERRRGKGHDGLYQGLSTATKDTYDALHMQALPPRSGATNFSLLKQAGDVEENPGPMLLLVTSLLLCELPHPAFLLIPRKVCNGIGIGEFKDSLSINATNIKHFKNCTSISGDLHILPVAFRGDSFTHTPPLDPQELDILKTVKEITGFLLIQAWPENRTDLHAFENLEIIRGRTKQHGQFSLAVVSLNITSLGLRSLKEISDGDVIISGNKNLCYANTINWKKLFGTSGQKTKIISNRGENSCKATGQVCHALCSPEGCWGPEPRDCVSCRNVSRGRECVDKCNLLEGEPREFVENSECIQCHPECLPQAMNITCTGRGPDNCIQCAHYIDGPHCVKTCPAGVMGENNTLVWKYADAGHVCHLCHPNCTYGCTGPGLEGCPTNGPKIPSIATGMVGALLLLLVVALGIGLFM

SEQ ID NO: 4924 - protein, 856 aa, synthetic construct
  REGION 1..856: note = Synthetic Peptide
MVLQTQVFISLLLWISGAYGQEQLVESGGRLVTPGGSLTLSCKASGFDFSAYYMSWVRQAPGKGLEWIATIYPSSGKTYYATWVNGRFTISSDNAQNTVDLQMNSLTAADRATYFCARDSYADDGALFNIWGPGTLVTISSGGGGSGGGGSGGGGSELVLTQSPSVSAALGSPAKITCTLSSAHKTDTIDWYQQLQGEAPRYLMQVQSDGSYTKRPGVPDRFSGSSSGADRYLIIPSVQADDEADYYCGADYIGGYVFGGGTQLTVTGTVPCPVPSTPPTPSPSTPPTPSPSCCHPMFWVLVVVGGVLACYSLLVTVAFIIFWVKRGRKKLLYIFKQPFMRPVQTTQEEDGCSCRFPEEEEGGCELRVKFSRSADAPAYQQGQNQLYNELNLGRREEYDVLDKRRGRDPEMGGKPRRKNPQEGLYNELQKDKMAEAYSEIGMKGERRRGKGHDGLYQGLSTATKDTYDALHMQALPPRSGATNFSLLKQAGDVEENPGPMLLLVTSLLLCELPHPAFLLIPRKVCNGIGIGEFKDSLSINATNIKHFKNCTSISGDLHILPVAFRGDSFTHTPPLDPQELDILKTVKEITGFLLIQAWPENRTDLHAFENLEIIRGRTKQHGQFSLAVVSLNITSLGLRSLKEISDGDVIISGNKNLCYANTINWKKLFGTSGQKTKIISNRGENSCKATGQVCHALCSPEGCWGPEPRDCVSCRNVSRGRECVDKCNLLEGEPREFVENSECIQCHPECLPQAMNITCTGRGPDNCIQCAHYIDGPHCVKTCPAGVMGENNTLVWKYADAGHVCHLCHPNCTYGCTGPGLEGCPTNGPKIPSIATGMVGALLLLLVVALGIGLFM

SEQ ID NO: 4925 - protein, 838 aa, synthetic construct
  REGION 1..838: note = Synthetic Peptide
MVLQTQVFISLLLWISGAYGQEQLVESGGRLVTPGGSLTLSCKASGFDFSAYYMSWVRQAPGKGLEWIATIYPSSGKTYYATWVNGRFTISSDNAQNTVDLQMNSLTAADRATYFCARDSYADDGALFNIWGPGTLVTISSGGGGSGGGGSGGGGSELVLTQSPSVSAALGSPAKITCTLSSAHKTDTIDWYQQLQGEAPRYLMQVQSDGSYTKRPGVPDRFSGSSSGADRYLIIPSVQADDEADYYCGADYIGGYVFGGGTQLTVTGSVCSRDFTPPMFWVLVVVGGVLACYSLLVTVAFIIFWVKRGRKKLLYIFKQPFMRPVQTTQEEDGCSCRFPEEEEGGCELRVKFSRSADAPAYQQGQNQLYNELNLGRREEYDVLDKRRGRDPEMGGKPRRKNPQEGLYNELQKDKMAEAYSEIGMKGERRRGKGHDGLYQGLSTATKDTYDALHMQALPPRSGATNFSLLKQAGDVEENPGPMLLLVTSLLLCELPHPAFLLIPRKVCNGIGIGEFKDSLSINATNIKHFKNCTSISGDLHILPVAFRGDSFTHTPPLDPQELDILKTVKEITGFLLIQAWPENRTDLHAFENLEIIRGRTKQHGQFSLAVVSLNITSLGLRSLKEISDGDVIISGNKNLCYANTINWKKLFGTSGQKTKIISNRGENSCKATGQVCHALCSPEGCWGPEPRDCVSCRNVSRGRECVDKCNLLEGEPREFVENSECIQCHPECLPQAMNITCTGRGPDNCIQCAHYIDGPHCVKTCPAGVMGENNTLVWKYADAGHVCHLCHPNCTYGCTGPGLEGCPTNGPKIPSIATGMVGALLLLLVVALGIGLFM

SEQ ID NO: 4926 - protein, 16 aa, synthetic construct
  REGION 1..16: note = Synthetic Peptide
EPRGPTIKPCPPCKCP

SEQ ID NO: 4927 - protein, 15 aa, synthetic construct
  REGION 1..15: note = Synthetic Peptide
EPRGPTIKPCPPCKC

SEQ ID NO: 4928 - protein, 15 aa, synthetic construct
  REGION 1..15: note = Synthetic Peptide
PRGPTIKPCPPCKCP

SEQ ID NO: 4929 - protein, 14 aa, synthetic construct
  REGION 1..14: note = Synthetic Peptide
EPRGPTIKPCPPCK

SEQ ID NO: 4930 - protein, 14 aa, synthetic construct
  REGION 1..14: note = Synthetic Peptide
PRGPTIKPCPPCKC

SEQ ID NO: 4931 - protein, 14 aa, synthetic construct
  REGION 1..14: note = Synthetic Peptide
RGPTIKPCPPCKCP

SEQ ID NO: 4932 - protein, 13 aa, synthetic construct
  REGION 1..13: note = Synthetic Peptide
EPRGPTIKPCPPC

SEQ ID NO: 4933 - protein, 13 aa, synthetic construct
  REGION 1..13: note = Synthetic Peptide
PRGPTIKPCPPCK

SEQ ID NO: 4934 - protein, 13 aa, synthetic construct
  REGION 1..13: note = Synthetic Peptide
RGPTIKPCPPCKC

SEQ ID NO: 4935 - protein, 13 aa, synthetic construct
  REGION 1..13: note = Synthetic Peptide
GPTIKPCPPCKCP

SEQ ID NO: 4936 - protein, 12 aa, synthetic construct
  REGION 1..12: note = Synthetic Peptide
EPRGPTIKPCPP

SEQ ID NO: 4937 - protein, 12 aa, synthetic construct
  REGION 1..12: note = Synthetic Peptide
PRGPTIKPCPPC

SEQ ID NO: 4938 - protein, 12 aa, synthetic construct
  REGION 1..12: note = Synthetic Peptide
RGPTIKPCPPCK

SEQ ID NO: 4939 - protein, 12 aa, synthetic construct
  REGION 1..12: note = Synthetic Peptide
GPTIKPCPPCKC

SEQ ID NO: 4940 - protein, 12 aa, synthetic construct
  REGION 1..12: note = Synthetic Peptide
PTIKPCPPCKCP

SEQ ID NO: 4941 - protein, 11 aa, synthetic construct
  REGION 1..11: note = Synthetic Peptide
EPRGPTIKPCP

SEQ ID NO: 4942 - protein, 11 aa, synthetic construct
  REGION 1..11: note = Synthetic Peptide
PRGPTIKPCPP

SEQ ID NO: 4943 - protein, 11 aa, synthetic construct
  REGION 1..11: note = Synthetic Peptide
RGPTIKPCPPC

SEQ ID NO: 4944 - protein, 11 aa, synthetic construct
  REGION 1..11: note = Synthetic Peptide
GPTIKPCPPCK

SEQ ID NO: 4945 - protein, 11 aa, synthetic construct
  REGION 1..11: note = Synthetic Peptide
PTIKPCPPCKC

SEQ ID NO: 4946 - protein, 11 aa, synthetic construct
  REGION 1..11: note = Synthetic Peptide
TIKPCPPCKCP

SEQ ID NO: 4947 - protein, 10 aa, synthetic construct
  REGION 1..10: note = Synthetic Peptide
EPRGPTIKPC

SEQ ID NO: 4948 - protein, 10 aa, synthetic construct
  REGION 1..10: note = Synthetic Peptide
PRGPTIKPCP

SEQ ID NO: 4949 - protein, 10 aa, synthetic construct
  REGION 1..10: note = Synthetic Peptide
RGPTIKPCPP

SEQ ID NO: 4950 - protein, 10 aa, synthetic construct
  REGION 1..10: note = Synthetic Peptide
GPTIKPCPPC

SEQ ID NO: 4951 - protein, 10 aa, synthetic construct
  REGION 1..10: note = Synthetic Peptide
PTIKPCPPCK

SEQ ID NO: 4952 - protein, 10 aa, synthetic construct
  REGION 1..10: note = Synthetic Peptide
TIKPCPPCKC

SEQ ID NO: 4953 - protein, 10 aa, synthetic construct
  REGION 1..10: note = Synthetic Peptide
IKPCPPCKCP

SEQ ID NO: 4954 - protein, 9 aa, synthetic construct
  REGION 1..9: note = Synthetic Peptide
KPCPPCKCP

SEQ ID NO: 4955 - protein, 9 aa, synthetic construct
  REGION 1..9: note = Synthetic Peptide
EPRGPTIKP

SEQ ID NO: 4956 - protein, 9 aa, synthetic construct
  REGION 1..9: note = Synthetic Peptide
PRGPTIKPC

SEQ ID NO: 4957 - protein, 9 aa, synthetic construct
  REGION 1..9: note = Synthetic Peptide
RGPTIKPCP

SEQ ID NO: 4958 - protein, 9 aa, synthetic construct
  REGION 1..9: note = Synthetic Peptide
GPTIKPCPP

SEQ ID NO: 4959 - protein, 9 aa, synthetic construct
  REGION 1..9: note = Synthetic Peptide
PTIKPCPPC

SEQ ID NO: 4960 - protein, 9 aa, synthetic construct
  REGION 1..9: note = Synthetic Peptide
TIKPCPPCK

SEQ ID NO: 4961 - protein, 9 aa, synthetic construct
  REGION 1..9: note = Synthetic Peptide
IKPCPPCKC

SEQ ID NO: 4962 - protein, 8 aa, synthetic construct
  REGION 1..8: note = Synthetic Peptide
KPCPPCKC

SEQ ID NO: 4963 - protein, 8 aa, synthetic construct
  REGION 1..8: note = Synthetic Peptide
PCPPCKCP

SEQ ID NO: 4964 - protein, 8 aa, synthetic construct
  REGION 1..8: note = Synthetic Peptide
EPRGPTIK

SEQ ID NO: 4965 - protein, 8 aa, synthetic construct
  REGION 1..8: note = Synthetic Peptide
PRGPTIKP

SEQ ID NO: 4966 - protein, 8 aa, synthetic construct
  REGION 1..8: note = Synthetic Peptide
RGPTIKPC

SEQ ID NO: 4967 - protein, 8 aa, synthetic construct
  REGION 1..8: note = Synthetic Peptide
GPTIKPCP

SEQ ID NO: 4968 - protein, 8 aa, synthetic construct
  REGION 1..8: note = Synthetic Peptide
PTIKPCPP

SEQ ID NO: 4969 - protein, 8 aa, synthetic construct
  REGION 1..8: note = Synthetic Peptide
TIKPCPPC

SEQ ID NO: 4970 - protein, 8 aa, synthetic construct
  REGION 1..8: note = Synthetic Peptide
IKPCPPCK

SEQ ID NO: 4971 - protein, 7 aa, synthetic construct
  REGION 1..7: note = Synthetic Peptide
EPRGPTI

SEQ ID NO: 4972 - protein, 7 aa, synthetic construct
  REGION 1..7: note = Synthetic Peptide
PRGPTIK

SEQ ID NO: 4973 - protein, 7 aa, synthetic construct
  REGION 1..7: note = Synthetic Peptide
RGPTIKP

SEQ ID NO: 4974 - protein, 7 aa, synthetic construct
  REGION 1..7: note = Synthetic Peptide
GPTIKPC

SEQ ID NO: 4975 - protein, 7 aa, synthetic construct
  REGION 1..7: note = Synthetic Peptide
PTIKPCP

SEQ ID NO: 4976 - protein, 7 aa, synthetic construct
  REGION 1..7: note = Synthetic Peptide
TIKPCPP

SEQ ID NO: 4977 - protein, 7 aa, synthetic construct
  REGION 1..7: note = Synthetic Peptide
IKPCPPC

SEQ ID NO: 4978 - protein, 7 aa, synthetic construct
  REGION 1..7: note = Synthetic Peptide
KPCPPCK

SEQ ID NO: 4979 - protein, 7 aa, synthetic construct
  REGION 1..7: note = Synthetic Peptide
PCPPCKC

SEQ ID NO: 4980 - protein, 7 aa, synthetic construct
  REGION 1..7: note = Synthetic Peptide
CPPCKCP

SEQ ID NO: 4981 - protein, 4 aa, synthetic construct
  REGION 1..4: note = Synthetic Peptide
DKKI

SEQ ID NO: 4982 - protein, 5 aa, synthetic construct
  REGION 1..5: note = Synthetic Peptide
VDKKI

SEQ ID NO: 4983 - protein, 4 aa, synthetic construct
  REGION 1..4: note = Synthetic Peptide
APNL

SEQ ID NO: 4984 - protein, 5 aa, synthetic construct
  REGION 1..5: note = Synthetic Peptide
APNLL

SEQ ID NO: 4985 - protein, 12 aa, synthetic construct
  REGION 1..12: note = Synthetic Peptide
ERKCCVECPPCP

SEQ ID NO: 4986 - protein, 16 aa, synthetic construct
  REGION 1..16: note = Synthetic Peptide
EPRGPTIKPCPPCKCP

SEQ ID NO: 4987 - protein, 12 aa, synthetic construct
  REGION 1..12: note = Synthetic Peptide
ESKYGPPCPSCP

SEQ ID NO: 4988 - protein, 12 aa, synthetic construct
  REGION 1..12: note = Synthetic Peptide
ESKYGPPCPPCP

SEQ ID NO: 4989 - protein, 9 aa, synthetic construct
  REGION 1..9: note = Synthetic Peptide
YGPPCPPCP

SEQ ID NO: 4990 - protein, 10 aa, synthetic construct
  REGION 1..10: note = Synthetic Peptide
KYGPPCPPCP

SEQ ID NO: 4991 - protein, 13 aa, synthetic construct
  REGION 1..13: note = Synthetic Peptide
EVVKYGPPCPPCP

SEQ ID NO: 4992 - protein, 24 aa, synthetic construct
  REGION 1..24: note = Synthetic Peptide
EPRGPTIKPCPPCKCPAPNLLGGP

SEQ ID NO: 4993 - protein, 398 aa, synthetic construct
  REGION 1..398: note = Synthetic Peptide
KTTAPSVYPLAPVCGDTTGSSVTLGCLVKGYFPEPVTLTWNSGSLSSGVHTFPAVLQSDLYTLSSSVTVTSSTWPSQSITCNVAHPASSTKVDKKIEPRGPTIKPCPPCKCPAPNLLGGPSVFIFPPKIKDVLMISLSPIVTCVVVDVSEDDPDVQISWFVNNVEVHTAQTQTHREDYNSTLRVVSALPIQHQDWMSGKEFKCKVNNKDLPAPIERTISKPKGSVRAPQVYVLPPPEEEMTKKQVTLTCMVTDFMPEDIYVEWTNNGKTELNYKNTEPVLDSDGSYFMYSKLRVEKKNWVERNSYSCSVVHEGLHNHHTTKSFSRTPGLDLDDVCAEAQDGELDGLWTTITIFISLFLLSVCYSASVTLFKVKWIFSSVVELKQTISPDYRNMIGQGA

SEQ ID NO: 4994 - protein, 353 aa, synthetic construct
  REGION 1..353: note = Synthetic Peptide
ASPTSPKVFPLSLCSTQPDGNVVIACLVQGFFPQEPLSVTWSESGQGVTARNFPPSQDASGDLYTTSSQLTLPATQCLAGKSVTCHVKHYTNPSQDVTVPCPVPSTPPTPSPSTPPTPSPSCCHPRLSLHRPALEDLLLGSEANLTCTLTGLRDASGVTFTWTPSSGKSAVQGPPERDLCGCYSVSSVLPGCAEPWNHGKTFTCTAAYPESKTPLTATLSKSGNTFRPEVHLLPPPSEELALNELVTLTCLARGFSPKDVLVRWLQGSQELPREKYLTWASRQEPSQGTTTFAVTSILRVAAEDWKKGDTFSCMVGHEALPLAFTQKTIDRLAGKPTHVNVSVVMAEVDGTCY

SEQ ID NO: 4995 - protein, 340 aa, synthetic construct
  REGION 1..340: note = Synthetic Peptide
ASPTSPKVFPLSLDSTPQDGNVVVACLVQGFFPQEPLSVTWSESGQNVTARNFPPSQDASGDLYTTSSQLTLPATQCPDGKSVTCHVKHYTNSSQDVTVPCRVPPPPPCCHPRLSLHRPALEDLLLGSEANLTCTLTGLRDASGATFTWTPSSGKSAVQGPPERDLCGCYSVSSVLPGCAQPWNHGETFTCTAAHPELKTPLTANITKSGNTFRPEVHLLPPPSEELALNELVTLTCLARGFSPKDVLVRWLQGSQELPREKYLTWASRQEPSQGTTTYAVTSILRVAAEDWKKGETFSCMVGHEALPLAFTQKTIDRMAGKPTHINVSVVMAEADGTCY

SEQ ID NO: 4996 - protein, 384 aa, synthetic construct
  REGION 1..384: note = Synthetic Peptide
APTKAPDVFPIISGCRHPKDNSPVVLACLITGYHPTSVTVTWYMGTQSQPQRTFPEIQRRDSYYMTSSQLSTPLQQWRQGEYKCVVQHTASKSKKEIFRWPESPKAQASSVPTAQPQAEGSLAKATTAPATTRNTGRGGEEKKKEKEKEEQEERETKTPECPSHTQPLGVYLLTPAVQDLWLRDKATFTCFVVGSDLKDAHLTWEVAGKVPTGGVEEGLLERHSNGSQSQHSRLTLPRSLWNAGTSVTCTLNHPSLPPQRLMALREPAAQAPVKLSLNLLASSDPPEAASWLLCEVSGFSPPNILLMWLEDQREVNTSGFAPARPPPQPRSTTFWAWSVLRVPAPPSPQPATYTCVVSHEDSRTLLNASRSLEVSYVTDHGPMK

SEQ ID NO: 4997 - protein, 428 aa, synthetic construct
  REGION 1..428: note = Synthetic Peptide
ASTQSPSVFPLTRCCKNIPSNATSVTLGCLATGYFPEPVMVTWDTGSLNGTTMTLPATTLTLSGHYATISLLTVSGAWAKQMFTCRVAHTPSSTDWVDNKTFSVCSRDFTPPTVKILQSSCDGGGHFPPTIQLLCLVSGYTPGTINITWLEDGQVMDVDLSTASTTQEGELASTQSELTLSQKHWLSDRTYTCQVTYQGHTFEDSTKKCADSNPRGVSAYLSRPSPFDLFIRKSPTITCLVVDLAPSKGTVNLTWSRASGKPVNHSTRKEEKQRNGTLTVTSTLPVGTRDWIEGETYQCRVTHPHLPRALMRSTTKTSGPRAAPEVYAFATPEWPGSRDKRTLACLIQNFMPEDISVQWLHNEVQLPDARHSTTQPRKTKGSGFFVFSRLEVTRAEWEQKDEFICRAVHEAASPSQTVQRAVSVNPGK

SEQ ID NO: 4998 - protein, 330 aa, synthetic construct [sequence omitted]

SEQ ID NO: 4999 - protein, 326 aa, synthetic construct
  REGION 1..326: note = Synthetic Peptide
ASTKGPSVFPLAPCSRSTSESTAALGCLVKDYFPEPVTVSWNSGALTSGVHTFPAVLQSSGLYSLSSVVTVPSSNFGTQTYTCNVDHKPSNTKVDKTVERKCCVECPPCPAPPVAGPSVFLFPPKPKDTLMISRTPEVTCVVVDVSHEDPEVQFNWYVDGVEVHNAKTKPREEQFNSTFRVVSVLTVVHQDWLNGKEYKCKVSNKGLPAPIEKTISKTKGQPREPQVYTLPPSREEMTKNQVSLTCLVKGFYPSDISVEWESNGQPENNYKTTPPMLDSDGSFFLYSKLTVDKSRWQQGNVFSCSVMHEALHNHYTQKSLSLSPGK

SEQ ID NO: 5000 - protein, 377 aa, synthetic construct
  REGION 1..377: note = Synthetic Peptide
ASTKGPSVFPLAPCSRSTSGGTAALGCLVKDYFPEPVTVSWNSGALTSGVHTFPAVLQSSGLYSLSSVVTVPSSSLGTQTYTCNVNHKPSNTKVDKRVELKTPLGDTTHTCPRCPEPKSCDTPPPCPRCPEPKSCDTPPPCPRCPEPKSCDTPPPCPRCPAPELLGGPSVFLFPPKPKDTLMISRTPEVTCVVVDVSHEDPEVQFKWYVDGVEVHNAKTKPREEQYNSTFRVVSVLTVLHQDWLNGKEYKCKVSNKALPAPIEKTISKTKGQPREPQVYTLPPSREEMTKNQVSLTCLVKGFYPSDIAVEWESSGQPENNYNTTPPMLDSDGSFFLYSKLTVDKSRWQQGNIFSCSVMHEALHNRFTQKSLSLSPGK

SEQ ID NO: 5001 - protein, 327 aa, synthetic construct
  REGION 1..327: note = Synthetic Peptide
ASTKGPSVFPLAPCSRSTSESTAALGCLVKDYFPEPVTVSWNSGALTSGVHTFPAVLQSSGLYSLSSVVTVPSSSLGTKTYTCNVDHKPSNTKVDKRVESKYGPPCPSCPAPEFLGGPSVFLFPPKPKDTLMISRTPEVTCVVVDVSQEDPEVQFNWYVDGVEVHNAKTKPREEQFNSTYRVVSVLTVLHQDWLNGKEYKCKVSNKGLPSSIEKTISKAKGQPREPQVYTLPPSQEEMTKNQVSLTCLVKGFYPSDIAVEWESNGQPENNYKTTPPVLDSDGSFFLYSRLTVDKSRWQEGNVFSCSVMHEALHNHYTQKSLSLSLGK

SEQ ID NO: 5002 - protein, 453 aa, synthetic construct
  REGION 1..453: note = Synthetic Peptide
GSASAPTLFPLVSCENSPSDTSSVAVGCLAQDFLPDSITFSWKYKNNSDISSTRGFPSVLRGGKYAATSQVLLPSKDVMQGTDEHVVCKVQHPNGNKEKNVPLPVIAELPPKVSVFVPPRDGFFGNPRKSKLICQATGFSPRQIQVSWLREGKQVGSGVTTDQVQAEAKESGPTTYKVTSTLTIKESDWLGQSMFTCRVDHRGLTFQQNASSMCVPDQDTAIRVFAIPPSFASIFLTKSTKLTCLVTDLTTYDSVTISWTRQNGEAVKTHTNISESHPNATFSAVGEASICEDDWNSGERFTCTVTHTDLPSPLKQTISRPKGVALHRPDVYLLPPAREQLNLRESATITCLVTGFSPADVFVQWMQRGQPLSPEKYVTSAPMPEPQAPGRYFAHSILTVSEEEWNTGETYTCVVAHEALPNRVTERTVDKSTGKPTLYNVSLVMSDTAGTCY

SEQ ID NO: 5003 - protein, 16 aa, synthetic construct
  REGION 1..16: note = scFv linker
GSTSGSGKPGSGEGSG

SEQ ID NO: 5004 - protein, 870 aa, synthetic construct
  REGION 1..870: note = scFv linker
MVLQTQVFISLLLWISGAYGDIQMTQSPSSLSASVGDRVTITCRASQDVNTAVAWYQQKPGKAPKLLIYSASFLYSGVPSRFSGSRSGTDFTLTISSLQPEDFATYYCQQHYTTPPTFGQGTKVEIKGSTSGSGKPGSGEGSGEVQLVESGGGLVQPGGSLRLSCAASGFNIKDTYIHWVRQAPGKGLEWVARIYPTNGYTRYADSVKGRFTISADTSKNTAYLQMNSLRAEDTAVYYCSRWGGDGFYAMDYWGQGTLVTVSSEPKSCDTPPPCPRCPEPKSCDTPPPCPRCPEPKSCDTPPPCPRCPAPMFWVLVVVGGVLACYSLLVTVAFIIFWVKRGRKKLLYIFKQPFMRPVQTTQEEDGCSCRFPEEEEGGCELRVKFSRSADAPAYQQGQNQLYNELNLGRREEYDVLDKRRGRDPEMGGKPRRKNPQEGLYNELQKDKMAEAYSEIGMKGERRRGKGHDGLYQGLSTATKDTYDALHMQALPPRSGATNFSLLKQAGDVEENPGPMLLLVTSLLLCELPHPAFLLIPRKVCNGIGIGEFKDSLSINATNIKHFKNCTSISGDLHILPVAFRGDSFTHTPPLDPQELDILKTVKEITGFLLIQAWPENRTDLHAFENLEIIRGRTKQHGQFSLAVVSLNITSLGLRSLKEISDGDVIISGNKNLCYANTINWKKLFGTSGQKTKIISNRGENSCKATGQVCHALCSPEGCWGPEPRDCVSCRNVSRGRECVDKCNLLEGEPREFVENSECIQCHPECLPQAMNITCTGRGPDNCIQCAHYIDGPHCVKTCPAGVMGENNTLVWKYADAGHVCHLCHPNCTYGCTGPGLEGCPTNGPKIPSIATGMVGALLLLLVVALGIGLFM

SEQ ID NO: 5005 - protein, 870 aa, synthetic construct; identical to SEQ ID NO: 5004
  REGION 1..870: note = scFv linker

SEQ ID NO: 5006 - protein, 855 aa, synthetic construct
  REGION 1..855: note = scFv linker
MVLQTQVFISLLLWISGAYGDIQMTQSPSSLSASVGDRVTITCRASQDVNTAVAWYQQKPGKAPKLLIYSASFLYSGVPSRFSGSRSGTDFTLTISSLQPEDFATYYCQQHYTTPPTFGQGTKVEIKGSTSGSGKPGSGEGSGEVQLVESGGGLVQPGGSLRLSCAASGFNIKDTYIHWVRQAPGKGLEWVARIYPTNGYTRYADSVKGRFTISADTSKNTAYLQMNSLRAEDTAVYYCSRWGGDGFYAMDYWGQGTLVTVSSEPKSCDTPPPCPRCPEPKSCDTPPPCPRCPAPMFWVLVVVGGVLACYSLLVTVAFIIFWVKRGRKKLLYIFKQPFMRPVQTTQEEDGCSCRFPEEEEGGCELRVKFSRSADAPAYQQGQNQLYNELNLGRREEYDVLDKRRGRDPEMGGKPRRKNPQEGLYNELQKDKMAEAYSEIGMKGERRRGKGHDGLYQGLSTATKDTYDALHMQALPPRSGATNFSLLKQAGDVEENPGPMLLLVTSLLLCELPHPAFLLIPRKVCNGIGIGEFKDSLSINATNIKHFKNCTSISGDLHILPVAFRGDSFTHTPPLDPQELDILKTVKEITGFLLIQAWPENRTDLHAFENLEIIRGRTKQHGQFSLAVVSLNITSLGLRSLKEISDGDVIISGNKNLCYANTINWKKLFGTSGQKTKIISNRGENSCKATGQVCHALCSPEGCWGPEPRDCVSCRNVSRGRECVDKCNLLEGEPREFVENSECIQCHPECLPQAMNITCTGRGPDNCIQCAHYIDGPHCVKTCPAGVMGENNTLVWKYADAGHVCHLCHPNCTYGCTGPGLEGCPTNGPKIPSIATGMVGALLLLLVVALGIGLFM

SEQ ID NO: 5007 - protein, 845 aa, synthetic construct
  REGION 1..845: note = scFv linker
MVLQTQVFISLLLWISGAYGDIQMTQSPSSLSASVGDRVTITCRASQDVNTAVAWYQQKPGKAPKLLIYSASFLYSGVPSRFSGSRSGTDFTLTISSLQPEDFATYYCQQHYTTPPTFGQGTKVEIKGSTSGSGKPGSGEGSGEVQLVESGGGLVQPGGSLRLSCAASGFNIKDTYIHWVRQAPGKGLEWVARIYPTNGYTRYADSVKGRFTISADTSKNTAYLQMNSLRAEDTAVYYCSRWGGDGFYAMDYWGQGTLVTVSSCPRCPEPKSCDTPPPCPRCPAPMFWVLVVVGGVLACYSLLVTVAFIIFWVKRGRKKLLYIFKQPFMRPVQTTQEEDGCSCRFPEEEEGGCELRVKFSRSADAPAYQQGQNQLYNELNLGRREEYDVLDKRRGRDPEMGGKPRRKNPQEGLYNELQKDKMAEAYSEIGMKGERRRGKGHDGLYQGLSTATKDTYDALHMQALPPRSGATNFSLLKQAGDVEENPGPMLLLVTSLLLCELPHPAFLLIPRKVCNGIGIGEFKDSLSINATNIKHFKNCTSISGDLHILPVAFRGDSFTHTPPLDPQELDILKTVKEITGFLLIQAWPENRTDLHAFENLEIIRGRTKQHGQFSLAVVSLNITSLGLRSLKEISDGDVIISGNKNLCYANTINWKKLFGTSGQKTKIISNRGENSCKATGQVCHALCSPEGCWGPEPRDCVSCRNVSRGRECVDKCNLLEGEPREFVENSECIQCHPECLPQAMNITCTGRGPDNCIQCAHYIDGPHCVKTCPAGVMGENNTLVWKYADAGHVCHLCHPNCTYGCTGPGLEGCPTNGPKIPSIATGMVGALLLLLVVALGIGLFM

SEQ ID NO: 5008 - protein, 851 aa, synthetic construct
  REGION 1..851: note = scFv linker
MVLQTQVFISLLLWISGAYGDIQMTQSPSSLSASVGDRVTITCRASQDVNTAVAWYQQKPGKAPKLLIYSASFLYSGVPSRFSGSRSGTDFTLTISSLQPEDFATYYCQQHYTTPPTFGQGTKVEIKGSTSGSGKPGSGEGSGEVQLVESGGGLVQPGGSLRLSCAASGFNIKDTYIHWVRQAPGKGLEWVARIYPTNGYTRYADSVKGRFTISADTSKNTAYLQMNSLRAEDTAVYYCSRWGGDGFYAMDYWGQGTLVTVSSTVPCPVPSTPPTPSPSTPPTPSPSCCHPMFWVLVVVGGVLACYSLLVTVAFIIFWVKRGRKKLLYIFKQPFMRPVQTTQEEDGCSCRFPEEEEGGCELRVKFSRSADAPAYQQGQNQLYNELNLGRREEYDVLDKRRGRDPEMGGKPRRKNPQEGLYNELQKDKMAEAYSEIGMKGERRRGKGHDGLYQGLSTATKDTYDALHMQALPPRSGATNFSLLKQAGDVEENPGPMLLLVTSLLLCELPHPAFLLIPRKVCNGIGIGEFKDSLSINATNIKHFKNCTSISGDLHILPVAFRGDSFTHTPPLDPQELDILKTVKEITGFLLIQAWPENRTDLHAFENLEIIRGRTKQHGQFSLAVVSLNITSLGLRSLKEISDGDVIISGNKNLCYANTINWKKLFGTSGQKTKIISNRGENSCKATGQVCHALCSPEGCWGPEPRDCVSCRNVSRGRECVDKCNLLEGEPREFVENSECIQCHPECLPQAMNITCTGRGPDNCIQCAHYIDGPHCVKTCPAGVMGENNTLVWKYADAGHVCHLCHPNCTYGCTGPGLEGCPTNGPKIPSIATGMVGALLLLLVVALGIGLFM

SEQ ID NO: 5009 - protein, 162 aa, synthetic construct
  REGION 1..162: note = scFv linker
LQDPCSNCPAGTFCDNNRNQICSPCPPNSFSSAGGQRTCDICRQCKGVFRTRKECSSTSNAECDCTPGFHCLGAGCSMCEQDCKQGQELTKKGCKDCCFGTFNDQKRGICRPWTNCSLDGKSVLVNGTKERDVVCGPSPADLSPGASSVTPPAPAREPGHSP

SEQ ID NO: 5010 - protein, 81 aa, synthetic construct
  REGION 1..81: note = scFv linker
DCKQGQELTKKGCKDCCFGTFNDQKRGICRPWTNCSLDGKSVLVNGTKERDVVCGPSPADLSPGASSVTPPAPAREPGHSP

SEQ ID NO: 5011 - protein, 27 aa, synthetic construct
  REGION 1..27: note = scFv linker
GPSPADLSPGASSVTPPAPAREPGHSP

SEQ ID NO: 5012 - protein, 49 aa, synthetic construct
  REGION 1..49: note = scFv linker
ASSGTTTPAPRPPTPAPTIASQPLSLRPEACRPAAGGAVHTRGLDFACD

SEQ ID NO: 5013 - protein, 171 aa, synthetic construct
  REGION 1..171: note = scFv linker
TPAPKSCPERHYWAQGKLCCQMCEPGTFLVKDCDQHRKAAQCDPCIPGVSFSPDHHTRPHCESCRHCNSGLLVRNCTITANAECACRNGWQCRDKECTECDPLPNPSLTARSSQALSPHPQPTHLPYVSEMLEARTAGHMQTLADFRQLPARTLSTHWPPQRSLCSSDFIR

SEQ ID NO: 5014 - protein, 70 aa, synthetic construct
  REGION 1..70: note = scFv linker
PLPNPSLTARSSQALSPHPQPTHLPYVSEMLEARTAGHMQTLADFRQLPARTLSTHWPPQRSLCSSDFIR

SEQ ID NO: 5015 - protein, 39 aa, synthetic construct
  REGION 1..39: note = scFv linker
IEVMYPPPYLDNEKSNGTIIHVKGKHLCPSPLFPGPSKP

SEQ ID NO: 5016 - protein, 12 aa, synthetic construct
  REGION 1..12: note = scFv linker
ESKYGPPSPPSP

SEQ ID NO: 5017 - protein, 30 aa, synthetic construct
  REGION 1..30: note = scFv linker
QTTPGERSSLPAFYPGTSGSCSGCGSLSLP

SEQ ID NO: 5018 - protein, 12 aa, synthetic construct
  REGION 1..12: note = scFv linker
ESKYGPPSPPSP

SEQ ID NO: 5019 - protein, 26 aa, synthetic construct
  REGION 1..26: note = scFv linker
DPPPFKVTLTGGYLHIYESQLCCQLK

SEQ ID NO: 5020 - protein, 48 aa, synthetic construct
  REGION 1..48: note = scFv linker
EDRDPPATQPQETQGPPARPITVQPTEAWPRTSQGPSTRPVEVPGGRA

SEQ ID NO: 5021 - protein, 844 aa, synthetic construct
  REGION 1..844: note = 4864 R12 / Reference - with GGGSG linker
MLLLVTSLLLCELPHPAFLLIPDIQMTQTTSSLSASLGDRVTISCRASQDISKYLNWYQQKPDGTVKLLIYHTSRLHSGVPSRFSGSGSGTDYSLTISNLEQEDIATYFCQQGNTLPYTFGGGTKLEITGSTSGSGKPGSGEGSTKGEVKLQESGPGLVAPSQSLSVTCTVSGVSLPDYGVSWIRQPPRKGLEWLGVIWGSETTYYNSALKSRLTIIKDNSKSQVFLKMNSLQTDDTAIYYCAKHYYYGGSYAMDYWGQGTSVTVSSGGGSGESKYGPPCPPCPMFWVLVVVGGVLACYSLLVTVAFIIFWVKRGRKKLLYIFKQPFMRPVQTTQEEDGCSCRFPEEEEGGCELRVKFSRSADAPAYQQGQNQLYNELNLGRREEYDVLDKRRGRDPEMGGKPRRKNPQEGLYNELQKDKMAEAYSEIGMKGERRRGKGHDGLYQGLSTATKDTYDALHMQALPPRSGATNFSLLKQAGDVEENPGPMLLLVTSLLLCELPHPAFLLIPRKVCNGIGIGEFKDSLSINATNIKHFKNCTSISGDLHILPVAFRGDSFTHTPPLDPQELDILKTVKEITGFLLIQAWPENRTDLHAFENLEIIRGRTKQHGQFSLAVVSLNITSLGLRSLKEISDGDVIISGNKNLCYANTINWKKLFGTSGQKTKIISNRGENSCKATGQVCHALCSPEGCWGPEPRDCVSCRNVSRGRECVDKCNLLEGEPREFVENSECIQCHPECLPQAMNITCTGRGPDNCIQCAHYIDGPHCVKTCPAGVMGENNTLVWKYADAGHVCHLCHPNCTYGCTGPGLEGCPTNGPKIPSIATGMVGALLLLLVVALGIGLFM

SEQ ID NO: 5022 - protein, 841 aa, synthetic construct
  REGION 1..841: note = 4914 (spacer 1) - with GGGSG linker
MLLLVTSLLLCELPHPAFLLIPDIQMTQTTSSLSASLGDRVTISCRASQDISKYLNWYQQKPDGTVKLLIYHTSRLHSGVPSRFSGSGSGTDYSLTISNLEQEDIATYFCQQGNTLPYTFGGGTKLEITGSTSGSGKPGSGEGSTKGEVKLQESGPGLVAPSQSLSVTCTVSGVSLPDYGVSWIRQPPRKGLEWLGVIWGSETTYYNSALKSRLTIIKDNSKSQVFLKMNSLQTDDTAIYYCAKHYYYGGSYAMDYWGQGTSVTVSSGGGSGKPCPPCKCPMFWVLVVVGGVLACYSLLVTVAFIIFWVKRGRKKLLYIFKQPFMRPVQTTQEEDGCSCRFPEEEEGGCELRVKFSRSADAPAYQQGQNQLYNELNLGRREEYDVLDKRRGRDPEMGGKPRRKNPQEGLYNELQKDKMAEAYSEIGMKGERRRGKGHDGLYQGLSTATKDTYDALHMQALPPRSGATNFSLLKQAGDVEENPGPMLLLVTSLLLCELPHPAFLLIPRKVCNGIGIGEFKDSLSINATNIKHFKNCTSISGDLHILPVAFRGDSFTHTPPLDPQELDILKTVKEITGFLLIQAWPENRTDLHAFENLEIIRGRTKQHGQFSLAVVSLNITSLGLRSLKEISDGDVIISGNKNLCYANTINWKKLFGTSGQKTKIISNRGENSCKATGQVCHALCSPEGCWGPEPRDCVSCRNVSRGRECVDKCNLLEGEPREFVENSECIQCHPECLPQAMNITCTGRGPDNCIQCAHYIDGPHCVKTCPAGVMGENNTLVWKYADAGHVCHLCHPNCTYGCTGPGLEGCPTNGPKIPSIATGMVGALLLLLVVALGIGLFM

SEQ ID NO: 5023 - protein, 848 aa, synthetic construct
  REGION 1..848: note = 4915 (spacer 11)- with GGGSG linker
MLLLVTSLLLCELPHPAFLLIPDIQMTQTTSSLSASLGDRVTISCRASQDISKYLNWYQQKPDGTVKLLIYHTSRLHSGVPSRFSGSGSGTDYSLTISNLEQEDIATYFCQQGNTLPYTFGGGTKLEITGSTSGSGKPGSGEGSTKGEVKLQESGPGLVAPSQSLSVTCTVSGVSLPDYGVSWIRQPPRKGLEWLGVIWGSETTYYNSALKSRLTIIKDNSKSQVFLKMNSLQTDDTAIYYCAKHYYYGGSYAMDYWGQGTSVTVSSGGGSGPKSCDKTHTCPPCPAPMFWVLVVVGGVLACYSLLVTVAFIIFWVKRGRKKLLYIFKQPFMRPVQTTQEEDGCSCRFPEEEEGGCELRVKFSRSADAPAYQQGQNQLYNELNLGRREEYDVLDKRRGRDPEMGGKPRRKNPQEGLYNELQKDKMAEAYSEIGMKGERRRGKGHDGLYQGLSTATKDTYDALHMQALPPRSGATNFSLLKQAGDVEENPGPMLLLVTSLLLCELPHPAFLLIPRKVCNGIGIGEFKDSLSINATNIKHFKNCTSISGDLHILPVAFRGDSFTHTPPLDPQELDILKTVKEITGFLLIQAWPENRTDLHAFENLEIIRGRTKQHGQFSLAVVSLNITSLGLRSLKEISDGDVIISGNKNLCYANTINWKKLFGTSGQKTKIISNRGENSCKATGQVCHALCSPEGCWGPEPRDCVSCRNVSRGRECVDKCNLLEGEPREFVENSECIQCHPECLPQAMNITCTGRGPDNCIQCAHYIDGPHCVKTCPAGVMGENNTLVWKYADAGHVCHLCHPNCTYGCTGPGLEGCPTNGPKIPSIATGMVGALLLLLVVALGIGLFM

SEQ ID NO: 5024 - protein, 840 aa, synthetic construct
  REGION 1..840: note = 4916 (spacer 13) - with GGGSG linker
MLLLVTSLLLCELPHPAFLLIPDIQMTQTTSSLSASLGDRVTISCRASQDISKYLNWYQQKPDGTVKLLIYHTSRLHSGVPSRFSGSGSGTDYSLTISNLEQEDIATYFCQQGNTLPYTFGGGTKLEITGSTSGSGKPGSGEGSTKGEVKLQESGPGLVAPSQSLSVTCTVSGVSLPDYGVSWIRQPPRKGLEWLGVIWGSETTYYNSALKSRLTIIKDNSKSQVFLKMNSLQTDDTAIYYCAKHYYYGGSYAMDYWGQGTSVTVSSGGGSGPCPRCPAPMFWVLVVVGGVLACYSLLVTVAFIIFWVKRGRKKLLYIFKQPFMRPVQTTQEEDGCSCRFPEEEEGGCELRVKFSRSADAPAYQQGQNQLYNELNLGRREEYDVLDKRRGRDPEMGGKPRRKNPQEGLYNELQKDKMAEAYSEIGMKGERRRGKGHDGLYQGLSTATKDTYDALHMQALPPRSGATNFSLLKQAGDVEENPGPMLLLVTSLLLCELPHPAFLLIPRKVCNGIGIGEFKDSLSINATNIKHFKNCTSISGDLHILPVAFRGDSFTHTPPLDPQELDILKTVKEITGFLLIQAWPENRTDLHAFENLEIIRGRTKQHGQFSLAVVSLNITSLGLRSLKEISDGDVIISGNKNLCYANTINWKKLFGTSGQKTKIISNRGENSCKATGQVCHALCSPEGCWGPEPRDCVSCRNVSRGRECVDKCNLLEGEPREFVENSECIQCHPECLPQAMNITCTGRGPDNCIQCAHYIDGPHCVKTCPAGVMGENNTLVWKYADAGHVCHLCHPNCTYGCTGPGLEGCPTNGPKIPSIATGMVGALLLLLVVALGIGLFM

SEQ ID NO: 5025 - protein, 843 aa, synthetic construct
  REGION 1..843: note = 4917 (spacer 14) - with GGGSG linker
MLLLVTSLLLCELPHPAFLLIPDIQMTQTTSSLSASLGDRVTISCRASQDISKYLNWYQQKPDGTVKLLIYHTSRLHSGVPSRFSGSGSGTDYSLTISNLEQEDIATYFCQQGNTLPYTFGGGTKLEITGSTSGSGKPGSGEGSTKGEVKLQESGPGLVAPSQSLSVTCTVSGVSLPDYGVSWIRQPPRKGLEWLGVIWGSETTYYNSALKSRLTIIKDNSKSQVFLKMNSLQTDDTAIYYCAKHYYYGGSYAMDYWGQGTSVTVSSGGGSGPCPAPPVAGPSMFWVLVVVGGVLACYSLLVTVAFIIFWVKRGRKKLLYIFKQPFMRPVQTTQEEDGCSCRFPEEEEGGCELRVKFSRSADAPAYQQGQNQLYNELNLGRREEYDVLDKRRGRDPEMGGKPRRKNPQEGLYNELQKDKMAEAYSEIGMKGERRRGKGHDGLYQGLSTATKDTYDALHMQALPPRSGATNFSLLKQAGDVEENPGPMLLLVTSLLLCELPHPAFLLIPRKVCNGIGIGEFKDSLSINATNIKHFKNCTSISGDLHILPVAFRGDSFTHTPPLDPQELDILKTVKEITGFLLIQAWPENRTDLHAFENLEIIRGRTKQHGQFSLAVVSLNITSLGLRSLKEISDGDVIISGNKNLCYANTINWKKLFGTSGQKTKIISNRGENSCKATGQVCHALCSPEGCWGPEPRDCVSCRNVSRGRECVDKCNLLEGEPREFVENSECIQCHPECLPQAMNITCTGRGPDNCIQCAHYIDGPHCVKTCPAGVMGENNTLVWKYADAGHVCHLCHPNCTYGCTGPGLEGCPTNGPKIPSIATGMVGALLLLLVVALGIGLFM

SEQ ID NO: 5026 - protein, 845 aa, synthetic construct
  REGION 1..845: note = 4873 / Reference - with GGGSG linker
MVLQTQVFISLLLWISGAYGQEQLVESGGRLVTPGGSLTLSCKASGFDFSAYYMSWVRQAPGKGLEWIATIYPSSGKTYYATWVNGRFTISSDNAQNTVDLQMNSLTAADRATYFCARDSYADDGALFNIWGPGTLVTISSGGGGSGGGGSGGGGSELVLTQSPSVSAALGSPAKITCTLSSAHKTDTIDWYQQLQGEAPRYLMQVQSDGSYTKRPGVPDRFSGSSSGADRYLIIPSVQADDEADYYCGADYIGGYVFGGGTQLTVTGGGGSGESKYGPPCPPCPMFWVLVVVGGVLACYSLLVTVAFIIFWVKRGRKKLLYIFKQPFMRPVQTTQEEDGCSCRFPEEEEGGCELRVKFSRSADAPAYQQGQNQLYNELNLGRREEYDVLDKRRGRDPEMGGKPRRKNPQEGLYNELQKDKMAEAYSEIGMKGERRRGKGHDGLYQGLSTATKDTYDALHMQALPPRSGATNFSLLKQAGDVEENPGPMLLLVTSLLLCELPHPAFLLIPRKVCNGIGIGEFKDSLSINATNIKHFKNCTSISGDLHILPVAFRGDSFTHTPPLDPQELDILKTVKEITGFLLIQAWPENRTDLHAFENLEIIRGRTKQHGQFSLAVVSLNITSLGLRSLKEISDGDVIISGNKNLCYANTINWKKLFGTSGQKTKIISNRGENSCKATGQVCHALCSPEGCWGPEPRDCVSCRNVSRGRECVDKCNLLEGEPREFVENSECIQCHPECLPQAMNITCTGRGPDNCIQCAHYIDGPHCVKTCPAGVMGENNTLVWKYADAGHVCHLCHPNCTYGCTGPGLEGCPTNGPKIPSIATGMVGALLLLLVVALGIGLFM

SEQ ID NO: 5027 - protein, 865 aa, synthetic construct
  REGION 1..865: note = 4918 (Spacer 7) - with GGGSG linker
MVLQTQVFISLLLWISGAYGQEQLVESGGRLVTPGGSLTLSCKASGFDFSAYYMSWVRQAPGKGLEWIATIYPSSGKTYYATWVNGRFTISSDNAQNTVDLQMNSLTAADRATYFCARDSYADDGALFNIWGPGTLVTISSGGGGSGGGGSGGGGSELVLTQSPSVSAALGSPAKITCTLSSAHKTDTIDWYQQLQGEAPRYLMQVQSDGSYTKRPGVPDRFSGSSSGADRYLIIPSVQADDEADYYCGADYIGGYVFGGGTQLTVTGGGGSGEPKSCDTPPPCPRCPEPKSCDTPPPCPRCPAPMFWVLVVVGGVLACYSLLVTVAFIIFWVKRGRKKLLYIFKQPFMRPVQTTQEEDGCSCRFPEEEEGGCELRVKFSRSADAPAYQQGQNQLYNELNLGRREEYDVLDKRRGRDPEMGGKPRRKNPQEGLYNELQKDKMAEAYSEIGMKGERRRGKGHDGLYQGLSTATKDTYDALHMQALPPRSGATNFSLLKQAGDVEENPGPMLLLVTSLLLCELPHPAFLLIPRKVCNGIGIGEFKDSLSINATNIKHFKNCTSISGDLHILPVAFRGDSFTHTPPLDPQELDILKTVKEITGFLLIQAWPENRTDLHAFENLEIIRGRTKQHGQFSLAVVSLNITSLGLRSLKEISDGDVIISGNKNLCYANTINWKKLFGTSGQKTKIISNRGENSCKATGQVCHALCSPEGCWGPEPRDCVSCRNVSRGRECVDKCNLLEGEPREFVENSECIQCHPECLPQAMNITCTGRGPDNCIQCAHYIDGPHCVKTCPAGVMGENNTLVWKYADAGHVCHLCHPNCTYGCTGPGLEGCPTNGPKIPSIATGMVGALLLLLVVALGIGLFM

SEQ ID NO: 5028 - protein, 855 aa, synthetic construct
  REGION 1..855: note = 4919 (Spacer 8) - with GGGSG linker
MVLQTQVFISLLLWISGAYGQEQLVESGGRLVTPGGSLTLSCKASGFDFSAYYMSWVRQAPGKGLEWIATIYPSSGKTYYATWVNGRFTISSDNAQNTVDLQMNSLTAADRATYFCARDSYADDGALFNIWGPGTLVTISSGGGGSGGGGSGGGGSELVLTQSPSVSAALGSPAKITCTLSSAHKTDTIDWYQQLQGEAPRYLMQVQSDGSYTKRPGVPDRFSGSSSGADRYLIIPSVQADDEADYYCGADYIGGYVFGGGTQLTVTGGGGSGCPRCPEPKSCDTPPPCPRCPAPMFWVLVVVGGVLACYSLLVTVAFIIFWVKRGRKKLLYIFKQPFMRPVQTTQEEDGCSCRFPEEEEGGCELRVKFSRSADAPAYQQGQNQLYNELNLGRREEYDVLDKRRGRDPEMGGKPRRKNPQEGLYNELQKDKMAEAYSEIGMKGERRRGKGHDGLYQGLSTATKDTYDALHMQALPPRSGATNFSLLKQAGDVEENPGPMLLLVTSLLLCELPHPAFLLIPRKVCNGIGIGEFKDSLSINATNIKHFKNCTSISGDLHILPVAFRGDSFTHTPPLDPQELDILKTVKEITGFLLIQAWPENRTDLHAFENLEIIRGRTKQHGQFSLAVVSLNITSLGLRSLKEISDGDVIISGNKNLCYANTINWKKLFGTSGQKTKIISNRGENSCKATGQVCHALCSPEGCWGPEPRDCVSCRNVSRGRECVDKCNLLEGEPREFVENSECIQCHPECLPQAMNITCTGRGPDNCIQCAHYIDGPHCVKTCPAGVMGENNTLVWKYADAGHVCHLCHPNCTYGCTGPGLEGCPTNGPKIPSIATGMVGALLLLLVVALGIGLFM

SEQ ID NO: 5029 - protein, 850 aa, synthetic construct
  REGION 1..850: note = 4920 (Spacer 9) - with GGGSG linker
MVLQTQVFISLLLWISGAYGQEQLVESGGRLVTPGGSLTLSCKASGFDFSAYYMSWVRQAPGKGLEWIATIYPSSGKTYYATWVNGRFTISSDNAQNTVDLQMNSLTAADRATYFCARDSYADDGALFNIWGPGTLVTISSGGGGSGGGGSGGGGSELVLTQSPSVSAALGSPAKITCTLSSAHKTDTIDWYQQLQGEAPRYLMQVQSDGSYTKRPGVPDRFSGSSSGADRYLIIPSVQADDEADYYCGADYIGGYVFGGGTQLTVTGGGGSGEPKSCDTPPPCPRCPAPMFWVLVVVGGVLACYSLLVTVAFIIFWVKRGRKKLLYIFKQPFMRPVQTTQEEDGCSCRFPEEEEGGCELRVKFSRSADAPAYQQGQNQLYNELNLGRREEYDVLDKRRGRDPEMGGKPRRKNPQEGLYNELQKDKMAEAYSEIGMKGERRRGKGHDGLYQGLSTATKDTYDALHMQALPPRSGATNFSLLKQAGDVEENPGPMLLLVTSLLLCELPHPAFLLIPRKVCNGIGIGEFKDSLSINATNIKHFKNCTSISGDLHILPVAFRGDSFTHTPPLDPQELDILKTVKEITGFLLIQAWPENRTDLHAFENLEIIRGRTKQHGQFSLAVVSLNITSLGLRSLKEISDGDVIISGNKNLCYANTINWKKLFGTSGQKTKIISNRGENSCKATGQVCHALCSPEGCWGPEPRDCVSCRNVSRGRECVDKCNLLEGEPREFVENSECIQCHPECLPQAMNITCTGRGPDNCIQCAHYIDGPHCVKTCPAGVMGENNTLVWKYADAGHVCHLCHPNCTYGCTGPGLEGCPTNGPKIPSIATGMVGALLLLLVVALGIGLFM

SEQ ID NO: 5030 - protein, 850 aa, synthetic construct
  REGION 1..850: note = 4921 (Spacer 10) - with GGGSG linker
MVLQTQVFISLLLWISGAYGQEQLVESGGRLVTPGGSLTLSCKASGFDFSAYYMSWVRQAPGKGLEWIATIYPSSGKTYYATWVNGRFTISSDNAQNTVDLQMNSLTAADRATYFCARDSYADDGALFNIWGPGTLVTISSGGGGSGGGGSGGGGSELVLTQSPSVSAALGSPAKITCTLSSAHKTDTIDWYQQLQGEAPRYLMQVQSDGSYTKRPGVPDRFSGSSSGADRYLIIPSVQADDEADYYCGADYIGGYVFGGGTQLTVTGGGGSGEPKSCDKTHTCPPCPAPMFWVLVVVGGVLACYSLLVTVAFIIFWVKRGRKKLLYIFKQPFMRPVQTTQEEDGCSCRFPEEEEGGCELRVKFSRSADAPAYQQGQNQLYNELNLGRREEYDVLDKRRGRDPEMGGKPRRKNPQEGLYNELQKDKMAEAYSEIGMKGERRRGKGHDGLYQGLSTATKDTYDALHMQALPPRSGATNFSLLKQAGDVEENPGPMLLLVTSLLLCELPHPAFLLIPRKVCNGIGIGEFKDSLSINATNIKHFKNCTSISGDLHILPVAFRGDSFTHTPPLDPQELDILKTVKEITGFLLIQAWPENRTDLHAFENLEIIRGRTKQHGQFSLAVVSLNITSLGLRSLKEISDGDVIISGNKNLCYANTINWKKLFGTSGQKTKIISNRGENSCKATGQVCHALCSPEGCWGPEPRDCVSCRNVSRGRECVDKCNLLEGEPREFVENSECIQCHPECLPQAMNITCTGRGPDNCIQCAHYIDGPHCVKTCPAGVMGENNTLVWKYADAGHVCHLCHPNCTYGCTGPGLEGCPTNGPKIPSIATGMVGALLLLLVVALGIGLFM

SEQ ID NO: 5031 - protein, 849 aa, synthetic construct
  REGION 1..849: note = 4922 (Spacer 11) - with GGGSG linker
MVLQTQVFISLLLWISGAYGQEQLVESGGRLVTPGGSLTLSCKASGFDFSAYYMSWVRQAPGKGLEWIATIYPSSGKTYYATWVNGRFTISSDNAQNTVDLQMNSLTAADRATYFCARDSYADDGALFNIWGPGTLVTISSGGGGSGGGGSGGGGSELVLTQSPSVSAALGSPAKITCTLSSAHKTDTIDWYQQLQGEAPRYLMQVQSDGSYTKRPGVPDRFSGSSSGADRYLIIPSVQADDEADYYCGADYIGGYVFGGGTQLTVTGGGGSGPKSCDKTHTCPPCPAPMFWVLVVVGGVLACYSLLVTVAFIIFWVKRGRKKLLYIFKQPFMRPVQTTQEEDGCSCRFPEEEEGGCELRVKFSRSADAPAYQQGQNQLYNELNLGRREEYDVLDKRRGRDPEMGGKPRRKNPQEGLYNELQKDKMAEAYSEIGMKGERRRGKGHDGLYQGLSTATKDTYDALHMQALPPRSGATNFSLLKQAGDVEENPGPMLLLVTSLLLCELPHPAFLLIPRKVCNGIGIGEFKDSLSINATNIKHFKNCTSISGDLHILPVAFRGDSFTHTPPLDPQELDILKTVKEITGFLLIQAWPENRTDLHAFENLEIIRGRTKQHGQFSLAVVSLNITSLGLRSLKEISDGDVIISGNKNLCYANTINWKKLFGTSGQKTKIISNRGENSCKATGQVCHALCSPEGCWGPEPRDCVSCRNVSRGRECVDKCNLLEGEPREFVENSECIQCHPECLPQAMNITCTGRGPDNCIQCAHYIDGPHCVKTCPAGVMGENNTLVWKYADAGHVCHLCHPNCTYGCTGPGLEGCPTNGPKIPSIATGMVGALLLLLVVALGIGLFM

SEQ ID NO: 5032 - protein, 844 aa, synthetic construct
  REGION 1..844: note = 4923 (Spacer 14) - with GGGSG linker
MVLQTQVFISLLLWISGAYGQEQLVESGGRLVTPGGSLTLSCKASGFDFSAYYMSWVRQAPGKGLEWIATIYPSSGKTYYATWVNGRFTISSDNAQNTVDLQMNSLTAADRATYFCARDSYADDGALFNIWGPGTLVTISSGGGGSGGGGSGGGGSELVLTQSPSVSAALGSPAKITCTLSSAHKTDTIDWYQQLQGEAPRYLMQVQSDGSYTKRPGVPDRFSGSSSGADRYLIIPSVQADDEADYYCGADYIGGYVFGGGTQLTVTGGGGSGPCPAPPVAGPSMFWVLVVVGGVLACYSLLVTVAFIIFWVKRGRKKLLYIFKQPFMRPVQTTQEEDGCSCRFPEEEEGGCELRVKFSRSADAPAYQQGQNQLYNELNLGRREEYDVLDKRRGRDPEMGGKPRRKNPQEGLYNELQKDKMAEAYSEIGMKGERRRGKGHDGLYQGLSTATKDTYDALHMQALPPRSGATNFSLLKQAGDVEENPGPMLLLVTSLLLCELPHPAFLLIPRKVCNGIGIGEFKDSLSINATNIKHFKNCTSISGDLHILPVAFRGDSFTHTPPLDPQELDILKTVKEITGFLLIQAWPENRTDLHAFENLEIIRGRTKQHGQFSLAVVSLNITSLGLRSLKEISDGDVIISGNKNLCYANTINWKKLFGTSGQKTKIISNRGENSCKATGQVCHALCSPEGCWGPEPRDCVSCRNVSRGRECVDKCNLLEGEPREFVENSECIQCHPECLPQAMNITCTGRGPDNCIQCAHYIDGPHCVKTCPAGVMGENNTLVWKYADAGHVCHLCHPNCTYGCTGPGLEGCPTNGPKIPSIATGMVGALLLLLVVALGIGLFM

SEQ ID NO: 5033 - protein, 861 aa, synthetic construct
  REGION 1..861: note = 4924 (Spacer 16) - with GGGSG linker
MVLQTQVFISLLLWISGAYGQEQLVESGGRLVTPGGSLTLSCKASGFDFSAYYMSWVRQAPGKGLEWIATIYPSSGKTYYATWVNGRFTISSDNAQNTVDLQMNSLTAADRATYFCARDSYADDGALFNIWGPGTLVTISSGGGGSGGGGSGGGGSELVLTQSPSVSAALGSPAKITCTLSSAHKTDTIDWYQQLQGEAPRYLMQVQSDGSYTKRPGVPDRFSGSSSGADRYLIIPSVQADDEADYYCGADYIGGYVFGGGTQLTVTGGGGSGTVPCPVPSTPPTPSPSTPPTPSPSCCHPMFWVLVVVGGVLACYSLLVTVAFIIFWVKRGRKKLLYIFKQPFMRPVQTTQEEDGCSCRFPEEEEGGCELRVKFSRSADAPAYQQGQNQLYNELNLGRREEYDVLDKRRGRDPEMGGKPRRKNPQEGLYNELQKDKMAEAYSEIGMKGERRRGKGHDGLYQGLSTATKDTYDALHMQALPPRSGATNFSLLKQAGDVEENPGPMLLLVTSLLLCELPHPAFLLIPRKVCNGIGIGEFKDSLSINATNIKHFKNCTSISGDLHILPVAFRGDSFTHTPPLDPQELDILKTVKEITGFLLIQAWPENRTDLHAFENLEIIRGRTKQHGQFSLAVVSLNITSLGLRSLKEISDGDVIISGNKNLCYANTINWKKLFGTSGQKTKIISNRGENSCKATGQVCHALCSPEGCWGPEPRDCVSCRNVSRGRECVDKCNLLEGEPREFVENSECIQCHPECLPQAMNITCTGRGPDNCIQCAHYIDGPHCVKTCPAGVMGENNTLVWKYADAGHVCHLCHPNCTYGCTGPGLEGCPTNGPKIPSIATGMVGALLLLLVVALGIGLFM

SEQ ID NO: 5034 - protein, 843 aa, synthetic construct
  REGION 1..843: note = 4925 (Spacer 28) - with GGGSG linker
MVLQTQVFISLLLWISGAYGQEQLVESGGRLVTPGGSLTLSCKASGFDFSAYYMSWVRQAPGKGLEWIATIYPSSGKTYYATWVNGRFTISSDNAQNTVDLQMNSLTAADRATYFCARDSYADDGALFNIWGPGTLVTISSGGGGSGGGGSGGGGSELVLTQSPSVSAALGSPAKITCTLSSAHKTDTIDWYQQLQGEAPRYLMQVQSDGSYTKRPGVPDRFSGSSSGADRYLIIPSVQADDEADYYCGADYIGGYVFGGGTQLTVTGGGGSGSVCSRDFTPPMFWVLVVVGGVLACYSLLVTVAFIIFWVKRGRKKLLYIFKQPFMRPVQTTQEEDGCSCRFPEEEEGGCELRVKFSRSADAPAYQQGQNQLYNELNLGRREEYDVLDKRRGRDPEMGGKPRRKNPQEGLYNELQKDKMAEAYSEIGMKGERRRGKGHDGLYQGLSTATKDTYDALHMQALPPRSGATNFSLLKQAGDVEENPGPMLLLVTSLLLCELPHPAFLLIPRKVCNGIGIGEFKDSLSINATNIKHFKNCTSISGDLHILPVAFRGDSFTHTPPLDPQELDILKTVKEITGFLLIQAWPENRTDLHAFENLEIIRGRTKQHGQFSLAVVSLNITSLGLRSLKEISDGDVIISGNKNLCYANTINWKKLFGTSGQKTKIISNRGENSCKATGQVCHALCSPEGCWGPEPRDCVSCRNVSRGRECVDKCNLLEGEPREFVENSECIQCHPECLPQAMNITCTGRGPDNCIQCAHYIDGPHCVKTCPAGVMGENNTLVWKYADAGHVCHLCHPNCTYGCTGPGLEGCPTNGPKIPSIATGMVGALLLLLVVALGIGLFM

SEQ ID NO: 5035 - protein, 875 aa, synthetic construct
  REGION 1..875: note = (Spacer 6) - with GGGSG linker
MVLQTQVFISLLLWISGAYGDIQMTQSPSSLSASVGDRVTITCRASQDVNTAVAWYQQKPGKAPKLLIYSASFLYSGVPSRFSGSRSGTDFTLTISSLQPEDFATYYCQQHYTTPPTFGQGTKVEIKGSTSGSGKPGSGEGSGEVQLVESGGGLVQPGGSLRLSCAASGFNIKDTYIHWVRQAPGKGLEWVARIYPTNGYTRYADSVKGRFTISADTSKNTAYLQMNSLRAEDTAVYYCSRWGGDGFYAMDYWGQGTLVTVSSGGGSGEPKSCDTPPPCPRCPEPKSCDTPPPCPRCPEPKSCDTPPPCPRCPAPMFWVLVVVGGVLACYSLLVTVAFIIFWVKRGRKKLLYIFKQPFMRPVQTTQEEDGCSCRFPEEEEGGCELRVKFSRSADAPAYQQGQNQLYNELNLGRREEYDVLDKRRGRDPEMGGKPRRKNPQEGLYNELQKDKMAEAYSEIGMKGERRRGKGHDGLYQGLSTATKDTYDALHMQALPPRSGATNFSLLKQAGDVEENPGPMLLLVTSLLLCELPHPAFLLIPRKVCNGIGIGEFKDSLSINATNIKHFKNCTSISGDLHILPVAFRGDSFTHTPPLDPQELDILKTVKEITGFLLIQAWPENRTDLHAFENLEIIRGRTKQHGQFSLAVVSLNITSLGLRSLKEISDGDVIISGNKNLCYANTINWKKLFGTSGQKTKIISNRGENSCKATGQVCHALCSPEGCWGPEPRDCVSCRNVSRGRECVDKCNLLEGEPREFVENSECIQCHPECLPQAMNITCTGRGPDNCIQCAHYIDGPHCVKTCPAGVMGENNTLVWKYADAGHVCHLCHPNCTYGCTGPGLEGCPTNGPKIPSIATGMVGALLLLLVVALGIGLFM

SEQ ID NO: 5036 - protein, 860 aa, synthetic construct
  REGION 1..860: note = (Spacer 7) - with GGGSG linker
MVLQTQVFISLLLWISGAYGDIQMTQSPSSLSASVGDRVTITCRASQDVNTAVAWYQQKPGKAPKLLIYSASFLYSGVPSRFSGSRSGTDFTLTISSLQPEDFATYYCQQHYTTPPTFGQGTKVEIKGSTSGSGKPGSGEGSGEVQLVESGGGLVQPGGSLRLSCAASGFNIKDTYIHWVRQAPGKGLEWVARIYPTNGYTRYADSVKGRFTISADTSKNTAYLQMNSLRAEDTAVYYCSRWGGDGFYAMDYWGQGTLVTVSSGGGSGEPKSCDTPPPCPRCPEPKSCDTPPPCPRCPAPMFWVLVVVGGVLACYSLLVTVAFIIFWVKRGRKKLLYIFKQPFMRPVQTTQEEDGCSCRFPEEEEGGCELRVKFSRSADAPAYQQGQNQLYNELNLGRREEYDVLDKRRGRDPEMGGKPRRKNPQEGLYNELQKDKMAEAYSEIGMKGERRRGKGHDGLYQGLSTATKDTYDALHMQALPPRSGATNFSLLKQAGDVEENPGPMLLLVTSLLLCELPHPAFLLIPRKVCNGIGIGEFKDSLSINATNIKHFKNCTSISGDLHILPVAFRGDSFTHTPPLDPQELDILKTVKEITGFLLIQAWPENRTDLHAFENLEIIRGRTKQHGQFSLAVVSLNITSLGLRSLKEISDGDVIISGNKNLCYANTINWKKLFGTSGQKTKIISNRGENSCKATGQVCHALCSPEGCWGPEPRDCVSCRNVSRGRECVDKCNLLEGEPREFVENSECIQCHPECLPQAMNITCTGRGPDNCIQCAHYIDGPHCVKTCPAGVMGENNTLVWKYADAGHVCHLCHPNCTYGCTGPGLEGCPTNGPKIPSIATGMVGALLLLLVVALGIGLFM

SEQ ID NO: 5037 - protein, 850 aa, synthetic construct
  REGION 1..850: note = (Spacer 8) - with GGGSG linker
MVLQTQVFISLLLWISGAYGDIQMTQSPSSLSASVGDRVTITCRASQDVNTAVAWYQQKPGKAPKLLIYSASFLYSGVPSRFSGSRSGTDFTLTISSLQPEDFATYYCQQHYTTPPTFGQGTKVEIKGSTSGSGKPGSGEGSGEVQLVESGGGLVQPGGSLRLSCAASGFNIKDTYIHWVRQAPGKGLEWVARIYPTNGYTRYADSVKGRFTISADTSKNTAYLQMNSLRAEDTAVYYCSRWGGDGFYAMDYWGQGTLVTVSSGGGSGCPRCPEPKSCDTPPPCPRCPAPMFWVLVVVGGVLACYSLLVTVAFIIFWVKRGRKKLLYIFKQPFMRPVQTTQEEDGCSCRFPEEEEGGCELRVKFSRSADAPAYQQGQNQLYNELNLGRREEYDVLDKRRGRDPEMGGKPRRKNPQEGLYNELQKDKMAEAYSEIGMKGERRRGKGHDGLYQGLSTATKDTYDALHMQALPPRSGATNFSLLKQAGDVEENPGPMLLLVTSLLLCELPHPAFLLIPRKVCNGIGIGEFKDSLSINATNIKHFKNCTSISGDLHILPVAFRGDSFTHTPPLDPQELDILKTVKEITGFLLIQAWPENRTDLHAFENLEIIRGRTKQHGQFSLAVVSLNITSLGLRSLKEISDGDVIISGNKNLCYANTINWKKLFGTSGQKTKIISNRGENSCKATGQVCHALCSPEGCWGPEPRDCVSCRNVSRGRECVDKCNLLEGEPREFVENSECIQCHPECLPQAMNITCTGRGPDNCIQCAHYIDGPHCVKTCPAGVMGENNTLVWKYADAGHVCHLCHPNCTYGCTGPGLEGCPTNGPKIPSIATGMVGALLLLLVVALGIGLFM

SEQ ID NO: 5038 - protein, 856 aa, synthetic construct
  REGION 1..856: note = Spacer 16) - with GGGSG linker
MVLQTQVFISLLLWISGAYGDIQMTQSPSSLSASVGDRVTITCRASQDVNTAVAWYQQKPGKAPKLLIYSASFLYSGVPSRFSGSRSGTDFTLTISSLQPEDFATYYCQQHYTTPPTFGQGTKVEIKGSTSGSGKPGSGEGSGEVQLVESGGGLVQPGGSLRLSCAASGFNIKDTYIHWVRQAPGKGLEWVARIYPTNGYTRYADSVKGRFTISADTSKNTAYLQMNSLRAEDTAVYYCSRWGGDGFYAMDYWGQGTLVTVSSGGGSGTVPCPVPSTPPTPSPSTPPTPSPSCCHPMFWVLVVVGGVLACYSLLVTVAFIIFWVKRGRKKLLYIFKQPFMRPVQTTQEEDGCSCRFPEEEEGGCELRVKFSRSADAPAYQQGQNQLYNELNLGRREEYDVLDKRRGRDPEMGGKPRRKNPQEGLYNELQKDKMAEAYSEIGMKGERRRGKGHDGLYQGLSTATKDTYDALHMQALPPRSGATNFSLLKQAGDVEENPGPMLLLVTSLLLCELPHPAFLLIPRKVCNGIGIGEFKDSLSINATNIKHFKNCTSISGDLHILPVAFRGDSFTHTPPLDPQELDILKTVKEITGFLLIQAWPENRTDLHAFENLEIIRGRTKQHGQFSLAVVSLNITSLGLRSLKEISDGDVIISGNKNLCYANTINWKKLFGTSGQKTKIISNRGENSCKATGQVCHALCSPEGCWGPEPRDCVSCRNVSRGRECVDKCNLLEGEPREFVENSECIQCHPECLPQAMNITCTGRGPDNCIQCAHYIDGPHCVKTCPAGVMGENNTLVWKYADAGHVCHLCHPNCTYGCTGPGLEGCPTNGPKIPSIATGMVGALLLLLVVALGIGLFM

SEQ ID NO: 5039 - protein, 70 aa, synthetic construct
  REGION 1..70: note = Spacer 4 + Linker
GGGGSGELKTPLGDTTHTCPRCPEPKSCDTPPPCPRCPEPKSCDTPPPCPRCPEPKSCDTPPPCPRCPAP

SEQ ID NO: 5040 - protein, 58 aa, synthetic construct
  REGION 1..58: note = Spacer 5 + Linker
GGGGSGCPRCPEPKSCDTPPPCPRCPEPKSCDTPPPCPRCPEPKSCDTPPPCPRCPAP

SEQ ID NO: 5041 - protein, 53 aa, synthetic construct
  REGION 1..53: note = Spacer 6 + Linker
GGGGSGEPKSCDTPPPCPRCPEPKSCDTPPPCPRCPEPKSCDTPPPCPRCPAP

SEQ ID NO: 5042 - protein, 14 aa, synthetic construct
  REGION 1..14: note = Spacer 1 + Linker
GGGSGKPCPPCKCP

SEQ ID NO: 5043 - protein, 12 aa, synthetic construct
  REGION 1..12: note = Spacer 15 + Linker
GGGSGPPKPKDT

SEQ ID NO: 5044 - protein, 13 aa, synthetic construct
  REGION 1..13: note = Spacer 21 + Linker
GGGGSGVPCPVPP

SEQ ID NO: 5045 - protein, 14 aa, synthetic construct
  REGION 1..14: note = Spacer 13 + Linker
GGGGSGPCPRCPAP

SEQ ID NO: 5046 - protein, 16 aa, synthetic construct
  REGION 1..16: note = Spacer 28 + Linker
GGGGSGSVCSRDFTPP

SEQ ID NO: 5047 - protein, 241 aa, synthetic construct
  REGION 1..241: note = 2A2 Binder
QVQLQQSGAELVRPGASVTLSCKASGYTFSDYEMHWVIQTPVHGLEWIGAIDPETGGTAYNQKFKGKAILTADKSSSTAYMELRSLTSEDSAVYYCTGYYDYDSFTYWGQGTLVTVSAGGGGSGGGGSGGGGSDIVMTQSQKIMSTTVGDRVSITCKASQNVDAAVAWYQQKPGQSPKLLIYSASNRYTGVPDRFTGSGSGTDFTLTISNMQSEDLADYFCQQYDIYPYTFGGGTKLEIKT

SEQ ID NO: 5048 - protein, 242 aa, synthetic construct
  REGION 1..242: note = R11 Binder
QSVKESEGDLVTPAGNLTLTCTASGSDINDYPISWVRQAPGKGLEWIGFINSGGSTWYASWVKGRFTISRTSTTVDLKMTSLTTDDTATYFCARGYSTYYGDFNIWGPGTLVTISSGGGGSGGGGSGGGGSELVMTQTPSSTSGAVGGTVTINCQASQSIDSNLAWFQQKPGQPPTLLIYRASNLASGVPSRFSGSRSGTEYTLTISGVQREDAATYYCLGGVGNVSYRTSFGGGTEVVVKT

SEQ ID NO: 5049 - protein, 842 aa, synthetic construct
  REGION 1..842: note = R12/ROR1
MVLQTQVFISLLLWISGAYGQEQLVESGGRLVTPGGSLTLSCKASGFDFSAYYMSWVRQAPGKGLEWIATIYPSSGKTYYATWVNGRFTISSDNAQNTVDLQMNSLTAADRATYFCARDSYADDGALFNIWGPGTLVTISSGGGGSGGGGSGGGGSELVLTQSPSVSAALGSPAKITCTLSSAHKTDTIDWYQQLQGEAPRYLMQVQSDGSYTKRPGVPDRFSGSSSGADRYLIIPSVQADDEADYYCGADYIGGYVFGGGTQLTVTGGGGSGKPCPPCKCPMFWVLVVVGGVLACYSLLVTVAFIIFWVKRGRKKLLYIFKQPFMRPVQTTQEEDGCSCRFPEEEEGGCELRVKFSRSADAPAYQQGQNQLYNELNLGRREEYDVLDKRRGRDPEMGGKPRRKNPQEGLYNELQKDKMAEAYSEIGMKGERRRGKGHDGLYQGLSTATKDTYDALHMQALPPRSGATNFSLLKQAGDVEENPGPMLLLVTSLLLCELPHPAFLLIPRKVCNGIGIGEFKDSLSINATNIKHFKNCTSISGDLHILPVAFRGDSFTHTPPLDPQELDILKTVKEITGFLLIQAWPENRTDLHAFENLEIIRGRTKQHGQFSLAVVSLNITSLGLRSLKEISDGDVIISGNKNLCYANTINWKKLFGTSGQKTKIISNRGENSCKATGQVCHALCSPEGCWGPEPRDCVSCRNVSRGRECVDKCNLLEGEPREFVENSECIQCHPECLPQAMNITCTGRGPDNCIQCAHYIDGPHCVKTCPAGVMGENNTLVWKYADAGHVCHLCHPNCTYGCTGPGLEGCPTNGPKIPSIATGMVGALLLLLVVALGIGLFM

SEQ ID NO: 5050 - protein, 840 aa, synthetic construct
  REGION 1..840: note = R12/ROR1
MVLQTQVFISLLLWISGAYGQEQLVESGGRLVTPGGSLTLSCKASGFDFSAYYMSWVRQAPGKGLEWIATIYPSSGKTYYATWVNGRFTISSDNAQNTVDLQMNSLTAADRATYFCARDSYADDGALFNIWGPGTLVTISSGGGGSGGGGSGGGGSELVLTQSPSVSAALGSPAKITCTLSSAHKTDTIDWYQQLQGEAPRYLMQVQSDGSYTKRPGVPDRFSGSSSGADRYLIIPSVQADDEADYYCGADYIGGYVFGGGTQLTVTGGGGSGPPKPKDTMFWVLVVVGGVLACYSLLVTVAFIIFWVKRGRKKLLYIFKQPFMRPVQTTQEEDGCSCRFPEEEEGGCELRVKFSRSADAPAYQQGQNQLYNELNLGRREEYDVLDKRRGRDPEMGGKPRRKNPQEGLYNELQKDKMAEAYSEIGMKGERRRGKGHDGLYQGLSTATKDTYDALHMQALPPRSGATNFSLLKQAGDVEENPGPMLLLVTSLLLCELPHPAFLLIPRKVCNGIGIGEFKDSLSINATNIKHFKNCTSISGDLHILPVAFRGDSFTHTPPLDPQELDILKTVKEITGFLLIQAWPENRTDLHAFENLEIIRGRTKQHGQFSLAVVSLNITSLGLRSLKEISDGDVIISGNKNLCYANTINWKKLFGTSGQKTKIISNRGENSCKATGQVCHALCSPEGCWGPEPRDCVSCRNVSRGRECVDKCNLLEGEPREFVENSECIQCHPECLPQAMNITCTGRGPDNCIQCAHYIDGPHCVKTCPAGVMGENNTLVWKYADAGHVCHLCHPNCTYGCTGPGLEGCPTNGPKIPSIATGMVGALLLLLVVALGIGLFM

SEQ ID NO: 5051 - protein, 840 aa, synthetic construct
  REGION 1..840: note = R12/ROR1
MVLQTQVFISLLLWISGAYGQEQLVESGGRLVTPGGSLTLSCKASGFDFSAYYMSWVRQAPGKGLEWIATIYPSSGKTYYATWVNGRFTISSDNAQNTVDLQMNSLTAADRATYFCARDSYADDGALFNIWGPGTLVTISSGGGGSGGGGSGGGGSELVLTQSPSVSAALGSPAKITCTLSSAHKTDTIDWYQQLQGEAPRYLMQVQSDGSYTKRPGVPDRFSGSSSGADRYLIIPSVQADDEADYYCGADYIGGYVFGGGTQLTVTGGGGSGVPCPVPPMFWVLVVVGGVLACYSLLVTVAFIIFWVKRGRKKLLYIFKQPFMRPVQTTQEEDGCSCRFPEEEEGGCELRVKFSRSADAPAYQQGQNQLYNELNLGRREEYDVLDKRRGRDPEMGGKPRRKNPQEGLYNELQKDKMAEAYSEIGMKGERRRGKGHDGLYQGLSTATKDTYDALHMQALPPRSGATNFSLLKQAGDVEENPGPMLLLVTSLLLCELPHPAFLLIPRKVCNGIGIGEFKDSLSINATNIKHFKNCTSISGDLHILPVAFRGDSFTHTPPLDPQELDILKTVKEITGFLLIQAWPENRTDLHAFENLEIIRGRTKQHGQFSLAVVSLNITSLGLRSLKEISDGDVIISGNKNLCYANTINWKKLFGTSGQKTKIISNRGENSCKATGQVCHALCSPEGCWGPEPRDCVSCRNVSRGRECVDKCNLLEGEPREFVENSECIQCHPECLPQAMNITCTGRGPDNCIQCAHYIDGPHCVKTCPAGVMGENNTLVWKYADAGHVCHLCHPNCTYGCTGPGLEGCPTNGPKIPSIATGMVGALLLLLVVALGIGLFM

SEQ ID NO: 5052 - protein, 848 aa, synthetic construct
  REGION 1..848: note = FMC63/CD19
MVLQTQVFISLLLWISGAYGDIQMTQTTSSLSASLGDRVTISCRASQDISKYLNWYQQKPDGTVKLLIYHTSRLHSGVPSRFSGSGSGTDYSLTISNLEQEDIATYFCQQGNTLPYTFGGGTKLEITGSTSGSGKPGSGEGSTKGEVKLQESGPGLVAPSQSLSVTCTVSGVSLPDYGVSWIRQPPRKGLEWLGVIWGSETTYYNSALKSRLTIIKDNSKSQVFLKMNSLQTDDTAIYYCAKHYYYGGSYAMDYWGQGTSVTVSSGGGGSGEPKSCDTPPPCPRCPAPMFWVLVVVGGVLACYSLLVTVAFIIFWVKRGRKKLLYIFKQPFMRPVQTTQEEDGCSCRFPEEEEGGCELRVKFSRSADAPAYQQGQNQLYNELNLGRREEYDVLDKRRGRDPEMGGKPRRKNPQEGLYNELQKDKMAEAYSEIGMKGERRRGKGHDGLYQGLSTATKDTYDALHMQALPPRSGATNFSLLKQAGDVEENPGPMLLLVTSLLLCELPHPAFLLIPRKVCNGIGIGEFKDSLSINATNIKHFKNCTSISGDLHILPVAFRGDSFTHTPPLDPQELDILKTVKEITGFLLIQAWPENRTDLHAFENLEIIRGRTKQHGQFSLAVVSLNITSLGLRSLKEISDGDVIISGNKNLCYANTINWKKLFGTSGQKTKIISNRGENSCKATGQVCHALCSPEGCWGPEPRDCVSCRNVSRGRECVDKCNLLEGEPREFVENSECIQCHPECLPQAMNITCTGRGPDNCIQCAHYIDGPHCVKTCPAGVMGENNTLVWKYADAGHVCHLCHPNCTYGCTGPGLEGCPTNGPKIPSIATGMVGALLLLLVVALGIGLFM

SEQ ID NO: 5053 - protein, 848 aa, synthetic construct
  REGION 1..848: note = FMC63/CD19
MVLQTQVFISLLLWISGAYGDIQMTQTTSSLSASLGDRVTISCRASQDISKYLNWYQQKPDGTVKLLIYHTSRLHSGVPSRFSGSGSGTDYSLTISNLEQEDIATYFCQQGNTLPYTFGGGTKLEITGSTSGSGKPGSGEGSTKGEVKLQESGPGLVAPSQSLSVTCTVSGVSLPDYGVSWIRQPPRKGLEWLGVIWGSETTYYNSALKSRLTIIKDNSKSQVFLKMNSLQTDDTAIYYCAKHYYYGGSYAMDYWGQGTSVTVSSGGGGSGEPKSCDKTHTCPPCPAPMFWVLVVVGGVLACYSLLVTVAFIIFWVKRGRKKLLYIFKQPFMRPVQTTQEEDGCSCRFPEEEEGGCELRVKFSRSADAPAYQQGQNQLYNELNLGRREEYDVLDKRRGRDPEMGGKPRRKNPQEGLYNELQKDKMAEAYSEIGMKGERRRGKGHDGLYQGLSTATKDTYDALHMQALPPRSGATNFSLLKQAGDVEENPGPMLLLVTSLLLCELPHPAFLLIPRKVCNGIGIGEFKDSLSINATNIKHFKNCTSISGDLHILPVAFRGDSFTHTPPLDPQELDILKTVKEITGFLLIQAWPENRTDLHAFENLEIIRGRTKQHGQFSLAVVSLNITSLGLRSLKEISDGDVIISGNKNLCYANTINWKKLFGTSGQKTKIISNRGENSCKATGQVCHALCSPEGCWGPEPRDCVSCRNVSRGRECVDKCNLLEGEPREFVENSECIQCHPECLPQAMNITCTGRGPDNCIQCAHYIDGPHCVKTCPAGVMGENNTLVWKYADAGHVCHLCHPNCTYGCTGPGLEGCPTNGPKIPSIATGMVGALLLLLVVALGIGLFM

SEQ ID NO: 5054 - protein, 847 aa, synthetic construct
  REGION 1..847: note = FMC63/CD29
MVLQTQVFISLLLWISGAYGDIQMTQTTSSLSASLGDRVTISCRASQDISKYLNWYQQKPDGTVKLLIYHTSRLHSGVPSRFSGSGSGTDYSLTISNLEQEDIATYFCQQGNTLPYTFGGGTKLEITGSTSGSGKPGSGEGSTKGEVKLQESGPGLVAPSQSLSVTCTVSGVSLPDYGVSWIRQPPRKGLEWLGVIWGSETTYYNSALKSRLTIIKDNSKSQVFLKMNSLQTDDTAIYYCAKHYYYGGSYAMDYWGQGTSVTVSSGGGGSGPKSCDKTHTCPPCPAPMFWVLVVVGGVLACYSLLVTVAFIIFWVKRGRKKLLYIFKQPFMRPVQTTQEEDGCSCRFPEEEEGGCELRVKFSRSADAPAYQQGQNQLYNELNLGRREEYDVLDKRRGRDPEMGGKPRRKNPQEGLYNELQKDKMAEAYSEIGMKGERRRGKGHDGLYQGLSTATKDTYDALHMQALPPRSGATNFSLLKQAGDVEENPGPMLLLVTSLLLCELPHPAFLLIPRKVCNGIGIGEFKDSLSINATNIKHFKNCTSISGDLHILPVAFRGDSFTHTPPLDPQELDILKTVKEITGFLLIQAWPENRTDLHAFENLEIIRGRTKQHGQFSLAVVSLNITSLGLRSLKEISDGDVIISGNKNLCYANTINWKKLFGTSGQKTKIISNRGENSCKATGQVCHALCSPEGCWGPEPRDCVSCRNVSRGRECVDKCNLLEGEPREFVENSECIQCHPECLPQAMNITCTGRGPDNCIQCAHYIDGPHCVKTCPAGVMGENNTLVWKYADAGHVCHLCHPNCTYGCTGPGLEGCPTNGPKIPSIATGMVGALLLLLVVALGIGLFM

SEQ ID NO: 5055 - protein, 855 aa, synthetic construct; identical to SEQ ID NO: 5006
  REGION 1..855: note = 4D5/Her2

SEQ ID NO: 5056 - protein, 845 aa, synthetic construct; identical to SEQ ID NO: 5007
  REGION 1..845: note = 4D5/Her2

SEQ ID NO: 5057 - protein, 851 aa, synthetic construct; identical to SEQ ID NO: 5008
  REGION 1..851: note = 4D5/Her2

SEQ ID NO: 5058 - protein, 835 aa, synthetic construct
  REGION 1..835: note = 2A2/ROR1
MVLQTQVFISLLLWISGAYGQVQLQQSGAELVRPGASVTLSCKASGYTFSDYEMHWVIQTPVHGLEWIGAIDPETGGTAYNQKFKGKAILTADKSSSTAYMELRSLTSEDSAVYYCTGYYDYDSFTYWGQGTLVTVSAGGGGSGGGGSGGGGSDIVMTQSQKIMSTTVGDRVSITCKASQNVDAAVAWYQQKPGQSPKLLIYSASNRYTGVPDRFTGSGSGTDFTLTISNMQSEDLADYFCQQYDIYPYTFGGGTKLEIKTGGGGSGPCPRCPAPMFWVLVVVGGVLACYSLLVTVAFIIFWVKRGRKKLLYIFKQPFMRPVQTTQEEDGCSCRFPEEEEGGCELRVKFSRSADAPAYQQGQNQLYNELNLGRREEYDVLDKRRGRDPEMGGKPRRKNPQEGLYNELQKDKMAEAYSEIGMKGERRRGKGHDGLYQGLSTATKDTYDALHMQALPPRSGATNFSLLKQAGDVEENPGPMLLLVTSLLLCELPHPAFLLIPRKVCNGIGIGEFKDSLSINATNIKHFKNCTSISGDLHILPVAFRGDSFTHTPPLDPQELDILKTVKEITGFLLIQAWPENRTDLHAFENLEIIRGRTKQHGQFSLAVVSLNITSLGLRSLKEISDGDVIISGNKNLCYANTINWKKLFGTSGQKTKIISNRGENSCKATGQVCHALCSPEGCWGPEPRDCVSCRNVSRGRECVDKCNLLEGEPREFVENSECIQCHPECLPQAMNITCTGRGPDNCIQCAHYIDGPHCVKTCPAGVMGENNTLVWKYADAGHVCHLCHPNCTYGCTGPGLEGCPTNGPKIPSIATGMVGALLLLLVVALGIGLFM

SEQ ID NO: 5059 - protein, 834 aa, synthetic construct
  REGION 1..834: note = 2A2/ROR1
MVLQTQVFISLLLWISGAYGQVQLQQSGAELVRPGASVTLSCKASGYTFSDYEMHWVIQTPVHGLEWIGAIDPETGGTAYNQKFKGKAILTADKSSSTAYMELRSLTSEDSAVYYCTGYYDYDSFTYWGQGTLVTVSAGGGGSGGGGSGGGGSDIVMTQSQKIMSTTVGDRVSITCKASQNVDAAVAWYQQKPGQSPKLLIYSASNRYTGVPDRFTGSGSGTDFTLTISNMQSEDLADYFCQQYDIYPYTFGGGTKLEIKTGGGGSGVPCPVPPMFWVLVVVGGVLACYSLLVTVAFIIFWVKRGRKKLLYIFKQPFMRPVQTTQEEDGCSCRFPEEEEGGCELRVKFSRSADAPAYQQGQNQLYNELNLGRREEYDVLDKRRGRDPEMGGKPRRKNPQEGLYNELQKDKMAEAYSEIGMKGERRRGKGHDGLYQGLSTATKDTYDALHMQALPPRSGATNFSLLKQAGDVEENPGPMLLLVTSLLLCELPHPAFLLIPRKVCNGIGIGEFKDSLSINATNIKHFKNCTSISGDLHILPVAFRGDSFTHTPPLDPQELDILKTVKEITGFLLIQAWPENRTDLHAFENLEIIRGRTKQHGQFSLAVVSLNITSLGLRSLKEISDGDVIISGNKNLCYANTINWKKLFGTSGQKTKIISNRGENSCKATGQVCHALCSPEGCWGPEPRDCVSCRNVSRGRECVDKCNLLEGEPREFVENSECIQCHPECLPQAMNITCTGRGPDNCIQCAHYIDGPHCVKTCPAGVMGENNTLVWKYADAGHVCHLCHPNCTYGCTGPGLEGCPTNGPKIPSIATGMVGALLLLLVVALGIGLFM

SEQ ID NO: 5060 - protein, 837 aa, synthetic construct
  REGION 1..837: note = 2A2/ROR1
MVLQTQVFISLLLWISGAYGQVQLQQSGAELVRPGASVTLSCKASGYTFSDYEMHWVIQTPVHGLEWIGAIDPETGGTAYNQKFKGKAILTADKSSSTAYMELRSLTSEDSAVYYCTGYYDYDSFTYWGQGTLVTVSAGGGGSGGGGSGGGGSDIVMTQSQKIMSTTVGDRVSITCKASQNVDAAVAWYQQKPGQSPKLLIYSASNRYTGVPDRFTGSGSGTDFTLTISNMQSEDLADYFCQQYDIYPYTFGGGTKLEIKTGGGGSGSVCSRDFTPPMFWVLVVVGGVLACYSLLVTVAFIIFWVKRGRKKLLYIFKQPFMRPVQTTQEEDGCSCRFPEEEEGGCELRVKFSRSADAPAYQQGQNQLYNELNLGRREEYDVLDKRRGRDPEMGGKPRRKNPQEGLYNELQKDKMAEAYSEIGMKGERRRGKGHDGLYQGLSTATKDTYDALHMQALPPRSGATNFSLLKQAGDVEENPGPMLLLVTSLLLCELPHPAFLLIPRKVCNGIGIGEFKDSLSINATNIKHFKNCTSISGDLHILPVAFRGDSFTHTPPLDPQELDILKTVKEITGFLLIQAWPENRTDLHAFENLEIIRGRTKQHGQFSLAVVSLNITSLGLRSLKEISDGDVIISGNKNLCYANTINWKKLFGTSGQKTKIISNRGENSCKATGQVCHALCSPEGCWGPEPRDCVSCRNVSRGRECVDKCNLLEGEPREFVENSECIQCHPECLPQAMNITCTGRGPDNCIQCAHYIDGPHCVKTCPAGVMGENNTLVWKYADAGHVCHLCHPNCTYGCTGPGLEGCPTNGPKIPSIATGMVGALLLLLVVALGIGLFM

SEQ ID NO: 5061 - protein, 892 aa, synthetic construct
  REGION 1..892: note = R11/ROR1
MVLQTQVFISLLLWISGAYGQSVKESEGDLVTPAGNLTLTCTASGSDINDYPISWVRQAPGKGLEWIGFINSGGSTWYASWVKGRFTISRTSTTVDLKMTSLTTDDTATYFCARGYSTYYGDFNIWGPGTLVTISSGGGGSGGGGSGGGGSELVMTQTPSSTSGAVGGTVTINCQASQSIDSNLAWFQQKPGQPPTLLIYRASNLASGVPSRFSGSRSGTEYTLTISGVQREDAATYYCLGGVGNVSYRTSFGGGTEVVVKTGGGGSGELKTPLGDTTHTCPRCPEPKSCDTPPPCPRCPEPKSCDTPPPCPRCPEPKSCDTPPPCPRCPAPMFWVLVVVGGVLACYSLLVTVAFIIFWVKRGRKKLLYIFKQPFMRPVQTTQEEDGCSCRFPEEEEGGCELRVKFSRSADAPAYQQGQNQLYNELNLGRREEYDVLDKRRGRDPEMGGKPRRKNPQEGLYNELQKDKMAEAYSEIGMKGERRRGKGHDGLYQGLSTATKDTYDALHMQALPPRSGATNFSLLKQAGDVEENPGPMLLLVTSLLLCELPHPAFLLIPRKVCNGIGIGEFKDSLSINATNIKHFKNCTSISGDLHILPVAFRGDSFTHTPPLDPQELDILKTVKEITGFLLIQAWPENRTDLHAFENLEIIRGRTKQHGQFSLAVVSLNITSLGLRSLKEISDGDVIISGNKNLCYANTINWKKLFGTSGQKTKIISNRGENSCKATGQVCHALCSPEGCWGPEPRDCVSCRNVSRGRECVDKCNLLEGEPREFVENSECIQCHPECLPQAMNITCTGRGPDNCIQCAHYIDGPHCVKTCPAGVMGENNTLVWKYADAGHVCHLCHPNCTYGCTGPGLEGCPTNGPKIPSIATGMVGALLLLLVVALGIGLFM

SEQ ID NO: 5062 - protein, 880 aa, synthetic construct
  REGION 1..880: note = R11/ROR1
MVLQTQVFISLLLWISGAYGQSVKESEGDLVTPAGNLTLTCTASGSDINDYPISWVRQAPGKGLEWIGFINSGGSTWYASWVKGRFTISRTSTTVDLKMTSLTTDDTATYFCARGYSTYYGDFNIWGPGTLVTISSGGGGSGGGGSGGGGSELVMTQTPSSTSGAVGGTVTINCQASQSIDSNLAWFQQKPGQPPTLLIYRASNLASGVPSRFSGSRSGTEYTLTISGVQREDAATYYCLGGVGNVSYRTSFGGGTEVVVKTGGGGSGCPRCPEPKSCDTPPPCPRCPEPKSCDTPPPCPRCPEPKSCDTPPPCPRCPAPMFWVLVVVGGVLACYSLLVTVAFIIFWVKRGRKKLLYIFKQPFMRPVQTTQEEDGCSCRFPEEEEGGCELRVKFSRSADAPAYQQGQNQLYNELNLGRREEYDVLDKRRGRDPEMGGKPRRKNPQEGLYNELQKDKMAEAYSEIGMKGERRRGKGHDGLYQGLSTATKDTYDALHMQALPPRSGATNFSLLKQAGDVEENPGPMLLLVTSLLLCELPHPAFLLIPRKVCNGIGIGEFKDSLSINATNIKHFKNCTSISGDLHILPVAFRGDSFTHTPPLDPQELDILKTVKEITGFLLIQAWPENRTDLHAFENLEIIRGRTKQHGQFSLAVVSLNITSLGLRSLKEISDGDVIISGNKNLCYANTINWKKLFGTSGQKTKIISNRGENSCKATGQVCHALCSPEGCWGPEPRDCVSCRNVSRGRECVDKCNLLEGEPREFVENSECIQCHPECLPQAMNITCTGRGPDNCIQCAHYIDGPHCVKTCPAGVMGENNTLVWKYADAGHVCHLCHPNCTYGCTGPGLEGCPTNGPKIPSIATGMVGALLLLLVVALGIGLFM

SEQ ID NO: 5063 - protein, 875 aa, synthetic construct
  REGION 1..875: note = R11/ROR1
MVLQTQVFISLLLWISGAYGQSVKESEGDLVTPAGNLTLTCTASGSDINDYPISWVRQAPGKGLEWIGFINSGGSTWYASWVKGRFTISRTSTTVDLKMTSLTTDDTATYFCARGYSTYYGDFNIWGPGTLVTISSGGGGSGGGGSGGGGSELVMTQTPSSTSGAVGGTVTINCQASQSIDSNLAWFQQKPGQPPTLLIYRASNLASGVPSRFSGSRSGTEYTLTISGVQREDAATYYCLGGVGNVSYRTSFGGGTEVVVKTGGGGSGEPKSCDTPPPCPRCPEPKSCDTPPPCPRCPEPKSCDTPPPCPRCPAPMFWVLVVVGGVLACYSLLVTVAFIIFWVKRGRKKLLYIFKQPFMRPVQTTQEEDGCSCRFPEEEEGGCELRVKFSRSADAPAYQQGQNQLYNELNLGRREEYDVLDKRRGRDPEMGGKPRRKNPQEGLYNELQKDKMAEAYSEIGMKGERRRGKGHDGLYQGLSTATKDTYDALHMQALPPRSGATNFSLLKQAGDVEENPGPMLLLVTSLLLCELPHPAFLLIPRKVCNGIGIGEFKDSLSINATNIKHFKNCTSISGDLHILPVAFRGDSFTHTPPLDPQELDILKTVKEITGFLLIQAWPENRTDLHAFENLEIIRGRTKQHGQFSLAVVSLNITSLGLRSLKEISDGDVIISGNKNLCYANTINWKKLFGTSGQKTKIISNRGENSCKATGQVCHALCSPEGCWGPEPRDCVSCRNVSRGRECVDKCNLLEGEPREFVENSECIQCHPECLPQAMNITCTGRGPDNCIQCAHYIDGPHCVKTCPAGVMGENNTLVWKYADAGHVCHLCHPNCTYGCTGPGLEGCPTNGPKIPSIATGMVGALLLLLVVALGIGLFM

SEQ ID NO: 5064 - protein, 335 aa, synthetic construct
  REGION 1..335: note = EGFRt with no signal peptide
RKVCNGIGIGEFKDSLSINATNIKHFKNCTSISGDLHILPVAFRGDSFTHTPPLDPQELDILKTVKEITGFLLIQAWPENRTDLHAFENLEIIRGRTKQHGQFSLAVVSLNITSLGLRSLKEISDGDVIISGNKNLCYANTINWKKLFGTSGQKTKIISNRGENSCKATGQVCHALCSPEGCWGPEPRDCVSCRNVSRGRECVDKCNLLEGEPREFVENSECIQCHPECLPQAMNITCTGRGPDNCIQCAHYIDGPHCVKTCPAGVMGENNTLVWKYADAGHVCHLCHPNCTYGCTGPGLEGCPTNGPKIPSIATGMVGALLLLLVVALGIGLFM

SEQ ID NO: 5065 - protein, 849 aa, synthetic construct; identical to SEQ ID NO: 5031
  REGION 1..849: note = R12 spacer 11

SEQ ID NO: 5066 - protein, 841 aa, synthetic construct
  REGION 1..841: note = R12 spacer 13
MVLQTQVFISLLLWISGAYGQEQLVESGGRLVTPGGSLTLSCKASGFDFSAYYMSWVRQAPGKGLEWIATIYPSSGKTYYATWVNGRFTISSDNAQNTVDLQMNSLTAADRATYFCARDSYADDGALFNIWGPGTLVTISSGGGGSGGGGSGGGGSELVLTQSPSVSAALGSPAKITCTLSSAHKTDTIDWYQQLQGEAPRYLMQVQSDGSYTKRPGVPDRFSGSSSGADRYLIIPSVQADDEADYYCGADYIGGYVFGGGTQLTVTGGGGSGPCPRCPAPMFWVLVVVGGVLACYSLLVTVAFIIFWVKRGRKKLLYIFKQPFMRPVQTTQEEDGCSCRFPEEEEGGCELRVKFSRSADAPAYQQGQNQLYNELNLGRREEYDVLDKRRGRDPEMGGKPRRKNPQEGLYNELQKDKMAEAYSEIGMKGERRRGKGHDGLYQGLSTATKDTYDALHMQALPPRSGATNFSLLKQAGDVEENPGPMLLLVTSLLLCELPHPAFLLIPRKVCNGIGIGEFKDSLSINATNIKHFKNCTSISGDLHILPVAFRGDSFTHTPPLDPQELDILKTVKEITGFLLIQAWPENRTDLHAFENLEIIRGRTKQHGQFSLAVVSLNITSLGLRSLKEISDGDVIISGNKNLCYANTINWKKLFGTSGQKTKIISNRGENSCKATGQVCHALCSPEGCWGPEPRDCVSCRNVSRGRECVDKCNLLEGEPREFVENSECIQCHPECLPQAMNITCTGRGPDNCIQCAHYIDGPHCVKTCPAGVMGENNTLVWKYADAGHVCHLCHPNCTYGCTGPGLEGCPTNGPKIPSIATGMVGALLLLLVVALGIGLFM

SEQ ID NO: 5067 - protein, 844 aa, synthetic construct; identical to SEQ ID NO: 5032
  REGION 1..844: note = R12 spacer 14

SEQ ID NO: 5068 - protein, 844 aa, synthetic construct
  REGION 1..844: note = R12 spacer 2
MVLQTQVFISLLLWISGAYGQEQLVESGGRLVTPGGSLTLSCKASGFDFSAYYMSWVRQAPGKGLEWIATIYPSSGKTYYATWVNGRFTISSDNAQNTVDLQMNSLTAADRATYFCARDSYADDGALFNIWGPGTLVTISSGGGGSGGGGSGGGGSELVLTQSPSVSAALGSPAKITCTLSSAHKTDTIDWYQQLQGEAPRYLMQVQSDGSYTKRPGVPDRFSGSSSGADRYLIIPSVQADDEADYYCGADYIGGYVFGGGTQLTVTGGGGSGKPCPPCKCPAPMFWVLVVVGGVLACYSLLVTVAFIIFWVKRGRKKLLYIFKQPFMRPVQTTQEEDGCSCRFPEEEEGGCELRVKFSRSADAPAYQQGQNQLYNELNLGRREEYDVLDKRRGRDPEMGGKPRRKNPQEGLYNELQKDKMAEAYSEIGMKGERRRGKGHDGLYQGLSTATKDTYDALHMQALPPRSGATNFSLLKQAGDVEENPGPMLLLVTSLLLCELPHPAFLLIPRKVCNGIGIGEFKDSLSINATNIKHFKNCTSISGDLHILPVAFRGDSFTHTPPLDPQELDILKTVKEITGFLLIQAWPENRTDLHAFENLEIIRGRTKQHGQFSLAVVSLNITSLGLRSLKEISDGDVIISGNKNLCYANTINWKKLFGTSGQKTKIISNRGENSCKATGQVCHALCSPEGCWGPEPRDCVSCRNVSRGRECVDKCNLLEGEPREFVENSECIQCHPECLPQAMNITCTGRGPDNCIQCAHYIDGPHCVKTCPAGVMGENNTLVWKYADAGHVCHLCHPNCTYGCTGPGLEGCPTNGPKIPSIATGMVGALLLLLVVALGIGLFM

SEQ ID NO: 5069 - protein, 847 aa, synthetic construct
  REGION 1..847: note = R12 spacer 3
MVLQTQVFISLLLWISGAYGQEQLVESGGRLVTPGGSLTLSCKASGFDFSAYYMSWVRQAPGKGLEWIATIYPSSGKTYYATWVNGRFTISSDNAQNTVDLQMNSLTAADRATYFCARDSYADDGALFNIWGPGTLVTISSGGGGSGGGGSGGGGSELVLTQSPSVSAALGSPAKITCTLSSAHKTDTIDWYQQLQGEAPRYLMQVQSDGSYTKRPGVPDRFSGSSSGADRYLIIPSVQADDEADYYCGADYIGGYVFGGGTQLTVTGGGGSGGPTIKPCPPKCPAPMFWVLVVVGGVLACYSLLVTVAFIIFWVKRGRKKLLYIFKQPFMRPVQTTQEEDGCSCRFPEEEEGGCELRVKFSRSADAPAYQQGQNQLYNELNLGRREEYDVLDKRRGRDPEMGGKPRRKNPQEGLYNELQKDKMAEAYSEIGMKGERRRGKGHDGLYQGLSTATKDTYDALHMQALPPRSGATNFSLLKQAGDVEENPGPMLLLVTSLLLCELPHPAFLLIPRKVCNGIGIGEFKDSLSINATNIKHFKNCTSISGDLHILPVAFRGDSFTHTPPLDPQELDILKTVKEITGFLLIQAWPENRTDLHAFENLEIIRGRTKQHGQFSLAVVSLNITSLGLRSLKEISDGDVIISGNKNLCYANTINWKKLFGTSGQKTKIISNRGENSCKATGQVCHALCSPEGCWGPEPRDCVSCRNVSRGRECVDKCNLLEGEPREFVENSECIQCHPECLPQAMNITCTGRGPDNCIQCAHYIDGPHCVKTCPAGVMGENNTLVWKYADAGHVCHLCHPNCTYGCTGPGLEGCPTNGPKIPSIATGMVGALLLLLVVALGIGLFM

SEQ ID NO: 5070 - protein, 840 aa, synthetic construct; identical to SEQ ID NO: 4873
  REGION 1..840: note = R12 Short IgG4 Hinge

SEQ ID NO: 5071 - protein, 845 aa, synthetic construct; identical to SEQ ID NO: 5026
  REGION 1..845: note = R12 Short IgG4 Hinge with optional linker

SEQ ID NO: 5072 - protein, 837 aa, synthetic construct
  REGION 1..837: note = R12 Spacer 1, without optional linker
MVLQTQVFISLLLWISGAYGQEQLVESGGRLVTPGGSLTLSCKASGFDFSAYYMSWVRQAPGKGLEWIATIYPSSGKTYYATWVNGRFTISSDNAQNTVDLQMNSLTAADRATYFCARDSYADDGALFNIWGPGTLVTISSGGGGSGGGGSGGGGSELVLTQSPSVSAALGSPAKITCTLSSAHKTDTIDWYQQLQGEAPRYLMQVQSDGSYTKRPGVPDRFSGSSSGADRYLIIPSVQADDEADYYCGADYIGGYVFGGGTQLTVTGKPCPPCKCPMFWVLVVVGGVLACYSLLVTVAFIIFWVKRGRKKLLYIFKQPFMRPVQTTQEEDGCSCRFPEEEEGGCELRVKFSRSADAPAYQQGQNQLYNELNLGRREEYDVLDKRRGRDPEMGGKPRRKNPQEGLYNELQKDKMAEAYSEIGMKGERRRGKGHDGLYQGLSTATKDTYDALHMQALPPRSGATNFSLLKQAGDVEENPGPMLLLVTSLLLCELPHPAFLLIPRKVCNGIGIGEFKDSLSINATNIKHFKNCTSISGDLHILPVAFRGDSFTHTPPLDPQELDILKTVKEITGFLLIQAWPENRTDLHAFENLEIIRGRTKQHGQFSLAVVSLNITSLGLRSLKEISDGDVIISGNKNLCYANTINWKKLFGTSGQKTKIISNRGENSCKATGQVCHALCSPEGCWGPEPRDCVSCRNVSRGRECVDKCNLLEGEPREFVENSECIQCHPECLPQAMNITCTGRGPDNCIQCAHYIDGPHCVKTCPAGVMGENNTLVWKYADAGHVCHLCHPNCTYGCTGPGLEGCPTNGPKIPSIATGMVGALLLLLVVALGIGLFM

SEQ ID NO: 5073 - protein, 844 aa, synthetic construct; identical to SEQ ID NO: 4922
  REGION 1..844: note = R12 Spacer 11, without optional

SEQ ID NO: 5074 - protein, 836 aa, synthetic construct
  REGION 1..836: note = R12 Spacer 13, without optional linker
MVLQTQVFISLLLWISGAYGQEQLVESGGRLVTPGGSLTLSCKASGFDFSAYYMSWVRQAPGKGLEWIATIYPSSGKTYYATWVNGRFTISSDNAQNTVDLQMNSLTAADRATYFCARDSYADDGALFNIWGPGTLVTISSGGGGSGGGGSGGGGSELVLTQSPSVSAALGSPAKITCTLSSAHKTDTIDWYQQLQGEAPRYLMQVQSDGSYTKRPGVPDRFSGSSSGADRYLIIPSVQADDEADYYCGADYIGGYVFGGGTQLTVTGPCPRCPAPMFWVLVVVGGVLACYSLLVTVAFIIFWVKRGRKKLLYIFKQPFMRPVQTTQEEDGCSCRFPEEEEGGCELRVKFSRSADAPAYQQGQNQLYNELNLGRREEYDVLDKRRGRDPEMGGKPRRKNPQEGLYNELQKDKMAEAYSEIGMKGERRRGKGHDGLYQGLSTATKDTYDALHMQALPPRSGATNFSLLKQAGDVEENPGPMLLLVTSLLLCELPHPAFLLIPRKVCNGIGIGEFKDSLSINATNIKHFKNCTSISGDLHILPVAFRGDSFTHTPPLDPQELDILKTVKEITGFLLIQAWPENRTDLHAFENLEIIRGRTKQHGQFSLAVVSLNITSLGLRSLKEISDGDVIISGNKNLCYANTINWKKLFGTSGQKTKIISNRGENSCKATGQVCHALCSPEGCWGPEPRDCVSCRNVSRGRECVDKCNLLEGEPREFVENSECIQCHPECLPQAMNITCTGRGPDNCIQCAHYIDGPHCVKTCPAGVMGENNTLVWKYADAGHVCHLCHPNCTYGCTGPGLEGCPTNGPKIPSIATGMVGALLLLLVVALGIGLFM

SEQ ID NO: 5075 - protein, 839 aa, synthetic construct; identical to SEQ ID NO: 4923
  REGION 1..839: note = R12 Spacer 14, without optional linker

SEQ ID NO: 5076 - protein, 837 aa, synthetic construct
  REGION 1..837: note = Cd19 CAR Short IgG4 Hinge
MVLQTQVFISLLLWISGAYGDIQMTQTTSSLSASLGDRVTISCRASQDISKYLNWYQQKPDGTVKLLIYHTSRLHSGVPSRFSGSGSGTDYSLTISNLEQEDIATYFCQQGNTLPYTFGGGTKLEITGSTSGSGKPGSGEGSTKGEVKLQESGPGLVAPSQSLSVTCTVSGVSLPDYGVSWIRQPPRKGLEWLGVIWGSETTYYNSALKSRLTIIKDNSKSQVFLKMNSLQTDDTAIYYCAKHYYYGGSYAMDYWGQGTSVTVSSESKYGPPCPPCPMFWVLVVVGGVLACYSLLVTVAFIIFWVKRGRKKLLYIFKQPFMRPVQTTQEEDGCSCRFPEEEEGGCELRVKFSRSADAPAYQQGQNQLYNELNLGRREEYDVLDKRRGRDPEMGGKPRRKNPQEGLYNELQKDKMAEAYSEIGMKGERRRGKGHDGLYQGLSTATKDTYDALHMQALPPRSGATNFSLLKQAGDVEENPGPMLLLVTSLLLCELPHPAFLLIPRKVCNGIGIGEFKDSLSINATNIKHFKNCTSISGDLHILPVAFRGDSFTHTPPLDPQELDILKTVKEITGFLLIQAWPENRTDLHAFENLEIIRGRTKQHGQFSLAVVSLNITSLGLRSLKEISDGDVIISGNKNLCYANTINWKKLFGTSGQKTKIISNRGENSCKATGQVCHALCSPEGCWGPEPRDCVSCRNVSRGRECVDKCNLLEGEPREFVENSECIQCHPECLPQAMNITCTGRGPDNCIQCAHYIDGPHCVKTCPAGVMGENNTLVWKYADAGHVCHLCHPNCTYGCTGPGLEGCPTNGPKIPSIATGMVGALLLLLVVALGIGLFM

SEQ ID NO: 5077 - protein, 863 aa, synthetic construct
  REGION 1..863: note = CD19 CAR and Spacer 7
MVLQTQVFISLLLWISGAYGDIQMTQTTSSLSASLGDRVTISCRASQDISKYLNWYQQKPDGTVKLLIYHTSRLHSGVPSRFSGSGSGTDYSLTISNLEQEDIATYFCQQGNTLPYTFGGGTKLEITGSTSGSGKPGSGEGSTKGEVKLQESGPGLVAPSQSLSVTCTVSGVSLPDYGVSWIRQPPRKGLEWLGVIWGSETTYYNSALKSRLTIIKDNSKSQVFLKMNSLQTDDTAIYYCAKHYYYGGSYAMDYWGQGTSVTVSSGGGGSGEPKSCDTPPPCPRCPEPKSCDTPPPCPRCPAPMFWVLVVVGGVLACYSLLVTVAFIIFWVKRGRKKLLYIFKQPFMRPVQTTQEEDGCSCRFPEEEEGGCELRVKFSRSADAPAYQQGQNQLYNELNLGRREEYDVLDKRRGRDPEMGGKPRRKNPQEGLYNELQKDKMAEAYSEIGMKGERRRGKGHDGLYQGLSTATKDTYDALHMQALPPRSGATNFSLLKQAGDVEENPGPMLLLVTSLLLCELPHPAFLLIPRKVCNGIGIGEFKDSLSINATNIKHFKNCTSISGDLHILPVAFRGDSFTHTPPLDPQELDILKTVKEITGFLLIQAWPENRTDLHAFENLEIIRGRTKQHGQFSLAVVSLNITSLGLRSLKEISDGDVIISGNKNLCYANTINWKKLFGTSGQKTKIISNRGENSCKATGQVCHALCSPEGCWGPEPRDCVSCRNVSRGRECVDKCNLLEGEPREFVENSECIQCHPECLPQAMNITCTGRGPDNCIQCAHYIDGPHCVKTCPAGVMGENNTLVWKYADAGHVCHLCHPNCTYGCTGPGLEGCPTNGPKIPSIATGMVGALLLLLVVALGIGLFM

SEQ ID NO: 5078 - protein, 853 aa, synthetic construct
  REGION 1..853: note = CD19 CAR and Spacer 8
MVLQTQVFISLLLWISGAYGDIQMTQTTSSLSASLGDRVTISCRASQDISKYLNWYQQKPDGTVKLLIYHTSRLHSGVPSRFSGSGSGTDYSLTISNLEQEDIATYFCQQGNTLPYTFGGGTKLEITGSTSGSGKPGSGEGSTKGEVKLQESGPGLVAPSQSLSVTCTVSGVSLPDYGVSWIRQPPRKGLEWLGVIWGSETTYYNSALKSRLTIIKDNSKSQVFLKMNSLQTDDTAIYYCAKHYYYGGSYAMDYWGQGTSVTVSSGGGGSGCPRCPEPKSCDTPPPCPRCPAPMFWVLVVVGGVLACYSLLVTVAFIIFWVKRGRKKLLYIFKQPFMRPVQTTQEEDGCSCRFPEEEEGGCELRVKFSRSADAPAYQQGQNQLYNELNLGRREEYDVLDKRRGRDPEMGGKPRRKNPQEGLYNELQKDKMAEAYSEIGMKGERRRGKGHDGLYQGLSTATKDTYDALHMQALPPRSGATNFSLLKQAGDVEENPGPMLLLVTSLLLCELPHPAFLLIPRKVCNGIGIGEFKDSLSINATNIKHFKNCTSISGDLHILPVAFRGDSFTHTPPLDPQELDILKTVKEITGFLLIQAWPENRTDLHAFENLEIIRGRTKQHGQFSLAVVSLNITSLGLRSLKEISDGDVIISGNKNLCYANTINWKKLFGTSGQKTKIISNRGENSCKATGQVCHALCSPEGCWGPEPRDCVSCRNVSRGRECVDKCNLLEGEPREFVENSECIQCHPECLPQAMNITCTGRGPDNCIQCAHYIDGPHCVKTCPAGVMGENNTLVWKYADAGHVCHLCHPNCTYGCTGPGLEGCPTNGPKIPSIATGMVGALLLLLVVALGIGLFM

SEQ ID NO: 5079 - protein, 848 aa, synthetic construct; identical to SEQ ID NO: 5052
  REGION 1..848: note = CD19 CAR and Spacer 9

SEQ ID NO: 5080 - protein, 848 aa, synthetic construct; identical to SEQ ID NO: 5053
  REGION 1..848: note = CD19 CAR and Spacer 10

SEQ ID NO: 5081 - protein, 847 aa, synthetic construct; identical to SEQ ID NO: 5054
  REGION 1..847: note = CD19 CAR and Spacer 11

SEQ ID NO: 5082 - protein, 842 aa, synthetic construct
  REGION 1..842: note = CD19 CAR and Spacer 14
MVLQTQVFISLLLWISGAYGDIQMTQTTSSLSASLGDRVTISCRASQDISKYLNWYQQKPDGTVKLLIYHTSRLHSGVPSRFSGSGSGTDYSLTISNLEQEDIATYFCQQGNTLPYTFGGGTKLEITGSTSGSGKPGSGEGSTKGEVKLQESGPGLVAPSQSLSVTCTVSGVSLPDYGVSWIRQPPRKGLEWLGVIWGSETTYYNSALKSRLTIIKDNSKSQVFLKMNSLQTDDTAIYYCAKHYYYGGSYAMDYWGQGTSVTVSSGGGGSGPCPAPPVAGPSMFWVLVVVGGVLACYSLLVTVAFIIFWVKRGRKKLLYIFKQPFMRPVQTTQEEDGCSCRFPEEEEGGCELRVKFSRSADAPAYQQGQNQLYNELNLGRREEYDVLDKRRGRDPEMGGKPRRKNPQEGLYNELQKDKMAEAYSEIGMKGERRRGKGHDGLYQGLSTATKDTYDALHMQALPPRSGATNFSLLKQAGDVEENPGPMLLLVTSLLLCELPHPAFLLIPRKVCNGIGIGEFKDSLSINATNIKHFKNCTSISGDLHILPVAFRGDSFTHTPPLDPQELDILKTVKEITGFLLIQAWPENRTDLHAFENLEIIRGRTKQHGQFSLAVVSLNITSLGLRSLKEISDGDVIISGNKNLCYANTINWKKLFGTSGQKTKIISNRGENSCKATGQVCHALCSPEGCWGPEPRDCVSCRNVSRGRECVDKCNLLEGEPREFVENSECIQCHPECLPQAMNITCTGRGPDNCIQCAHYIDGPHCVKTCPAGVMGENNTLVWKYADAGHVCHLCHPNCTYGCTGPGLEGCPTNGPKIPSIATGMVGALLLLLVVALGIGLFM

SEQ ID NO: 5083 - protein, 859 aa, synthetic construct
  REGION 1..859: note = CD19 CAR and Spacer 16
MVLQTQVFISLLLWISGAYGDIQMTQTTSSLSASLGDRVTISCRASQDISKYLNWYQQKPDGTVKLLIYHTSRLHSGVPSRFSGSGSGTDYSLTISNLEQEDIATYFCQQGNTLPYTFGGGTKLEITGSTSGSGKPGSGEGSTKGEVKLQESGPGLVAPSQSLSVTCTVSGVSLPDYGVSWIRQPPRKGLEWLGVIWGSETTYYNSALKSRLTIIKDNSKSQVFLKMNSLQTDDTAIYYCAKHYYYGGSYAMDYWGQGTSVTVSSGGGGSGTVPCPVPSTPPTPSPSTPPTPSPSCCHPMFWVLVVVGGVLACYSLLVTVAFIIFWVKRGRKKLLYIFKQPFMRPVQTTQEEDGCSCRFPEEEEGGCELRVKFSRSADAPAYQQGQNQLYNELNLGRREEYDVLDKRRGRDPEMGGKPRRKNPQEGLYNELQKDKMAEAYSEIGMKGERRRGKGHDGLYQGLSTATKDTYDALHMQALPPRSGATNFSLLKQAGDVEENPGPMLLLVTSLLLCELPHPAFLLIPRKVCNGIGIGEFKDSLSINATNIKHFKNCTSISGDLHILPVAFRGDSFTHTPPLDPQELDILKTVKEITGFLLIQAWPENRTDLHAFENLEIIRGRTKQHGQFSLAVVSLNITSLGLRSLKEISDGDVIISGNKNLCYANTINWKKLFGTSGQKTKIISNRGENSCKATGQVCHALCSPEGCWGPEPRDCVSCRNVSRGRECVDKCNLLEGEPREFVENSECIQCHPECLPQAMNITCTGRGPDNCIQCAHYIDGPHCVKTCPAGVMGENNTLVWKYADAGHVCHLCHPNCTYGCTGPGLEGCPTNGPKIPSIATGMVGALLLLLVVALGIGLFM

SEQ ID NO: 5084 - protein, 841 aa, synthetic construct
  REGION 1..841: note = CD19 CAR and Spacer 28
MVLQTQVFISLLLWISGAYGDIQMTQTTSSLSASLGDRVTISCRASQDISKYLNWYQQKPDGTVKLLIYHTSRLHSGVPSRFSGSGSGTDYSLTISNLEQEDIATYFCQQGNTLPYTFGGGTKLEITGSTSGSGKPGSGEGSTKGEVKLQESGPGLVAPSQSLSVTCTVSGVSLPDYGVSWIRQPPRKGLEWLGVIWGSETTYYNSALKSRLTIIKDNSKSQVFLKMNSLQTDDTAIYYCAKHYYYGGSYAMDYWGQGTSVTVSSGGGGSGSVCSRDFTPPMFWVLVVVGGVLACYSLLVTVAFIIFWVKRGRKKLLYIFKQPFMRPVQTTQEEDGCSCRFPEEEEGGCELRVKFSRSADAPAYQQGQNQLYNELNLGRREEYDVLDKRRGRDPEMGGKPRRKNPQEGLYNELQKDKMAEAYSEIGMKGERRRGKGHDGLYQGLSTATKDTYDALHMQALPPRSGATNFSLLKQAGDVEENPGPMLLLVTSLLLCELPHPAFLLIPRKVCNGIGIGEFKDSLSINATNIKHFKNCTSISGDLHILPVAFRGDSFTHTPPLDPQELDILKTVKEITGFLLIQAWPENRTDLHAFENLEIIRGRTKQHGQFSLAVVSLNITSLGLRSLKEISDGDVIISGNKNLCYANTINWKKLFGTSGQKTKIISNRGENSCKATGQVCHALCSPEGCWGPEPRDCVSCRNVSRGRECVDKCNLLEGEPREFVENSECIQCHPECLPQAMNITCTGRGPDNCIQCAHYIDGPHCVKTCPAGVMGENNTLVWKYADAGHVCHLCHPNCTYGCTGPGLEGCPTNGPKIPSIATGMVGALLLLLVVALGIGLFM

SEQ ID NO: 5085 - protein, 840 aa, synthetic construct
  REGION 1..840: note = CD19 CAR and Spacer 1
MVLQTQVFISLLLWISGAYGDIQMTQTTSSLSASLGDRVTISCRASQDISKYLNWYQQKPDGTVKLLIYHTSRLHSGVPSRFSGSGSGTDYSLTISNLEQEDIATYFCQQGNTLPYTFGGGTKLEITGSTSGSGKPGSGEGSTKGEVKLQESGPGLVAPSQSLSVTCTVSGVSLPDYGVSWIRQPPRKGLEWLGVIWGSETTYYNSALKSRLTIIKDNSKSQVFLKMNSLQTDDTAIYYCAKHYYYGGSYAMDYWGQGTSVTVSSGGGGSGKPCPPCKCPMFWVLVVVGGVLACYSLLVTVAFIIFWVKRGRKKLLYIFKQPFMRPVQTTQEEDGCSCRFPEEEEGGCELRVKFSRSADAPAYQQGQNQLYNELNLGRREEYDVLDKRRGRDPEMGGKPRRKNPQEGLYNELQKDKMAEAYSEIGMKGERRRGKGHDGLYQGLSTATKDTYDALHMQALPPRSGATNFSLLKQAGDVEENPGPMLLLVTSLLLCELPHPAFLLIPRKVCNGIGIGEFKDSLSINATNIKHFKNCTSISGDLHILPVAFRGDSFTHTPPLDPQELDILKTVKEITGFLLIQAWPENRTDLHAFENLEIIRGRTKQHGQFSLAVVSLNITSLGLRSLKEISDGDVIISGNKNLCYANTINWKKLFGTSGQKTKIISNRGENSCKATGQVCHALCSPEGCWGPEPRDCVSCRNVSRGRECVDKCNLLEGEPREFVENSECIQCHPECLPQAMNITCTGRGPDNCIQCAHYIDGPHCVKTCPAGVMGENNTLVWKYADAGHVCHLCHPNCTYGCTGPGLEGCPTNGPKIPSIATGMVGALLLLLVVALGIGLFM

SEQ ID NO: 5086 - protein, 842 aa, synthetic construct
  REGION 1..842: note = CD19 CAR and Spacer 2
MVLQTQVFISLLLWISGAYGDIQMTQTTSSLSASLGDRVTISCRASQDISKYLNWYQQKPDGTVKLLIYHTSRLHSGVPSRFSGSGSGTDYSLTISNLEQEDIATYFCQQGNTLPYTFGGGTKLEITGSTSGSGKPGSGEGSTKGEVKLQESGPGLVAPSQSLSVTCTVSGVSLPDYGVSWIRQPPRKGLEWLGVIWGSETTYYNSALKSRLTIIKDNSKSQVFLKMNSLQTDDTAIYYCAKHYYYGGSYAMDYWGQGTSVTVSSGGGGSGKPCPPCKCPAPMFWVLVVVGGVLACYSLLVTVAFIIFWVKRGRKKLLYIFKQPFMRPVQTTQEEDGCSCRFPEEEEGGCELRVKFSRSADAPAYQQGQNQLYNELNLGRREEYDVLDKRRGRDPEMGGKPRRKNPQEGLYNELQKDKMAEAYSEIGMKGERRRGKGHDGLYQGLSTATKDTYDALHMQALPPRSGATNFSLLKQAGDVEENPGPMLLLVTSLLLCELPHPAFLLIPRKVCNGIGIGEFKDSLSINATNIKHFKNCTSISGDLHILPVAFRGDSFTHTPPLDPQELDILKTVKEITGFLLIQAWPENRTDLHAFENLEIIRGRTKQHGQFSLAVVSLNITSLGLRSLKEISDGDVIISGNKNLCYANTINWKKLFGTSGQKTKIISNRGENSCKATGQVCHALCSPEGCWGPEPRDCVSCRNVSRGRECVDKCNLLEGEPREFVENSECIQCHPECLPQAMNITCTGRGPDNCIQCAHYIDGPHCVKTCPAGVMGENNTLVWKYADAGHVCHLCHPNCTYGCTGPGLEGCPTNGPKIPSIATGMVGALLLLLVVALGIGLFM

SEQ ID NO: 5087 - protein, 845 aa, synthetic construct
  REGION 1..845: note = CD19 CAR and Spacer 3
MVLQTQVFISLLLWISGAYGDIQMTQTTSSLSASLGDRVTISCRASQDISKYLNWYQQKPDGTVKLLIYHTSRLHSGVPSRFSGSGSGTDYSLTISNLEQEDIATYFCQQGNTLPYTFGGGTKLEITGSTSGSGKPGSGEGSTKGEVKLQESGPGLVAPSQSLSVTCTVSGVSLPDYGVSWIRQPPRKGLEWLGVIWGSETTYYNSALKSRLTIIKDNSKSQVFLKMNSLQTDDTAIYYCAKHYYYGGSYAMDYWGQGTSVTVSSGGGGSGGPTIKPCPPKCPAPMFWVLVVVGGVLACYSLLVTVAFIIFWVKRGRKKLLYIFKQPFMRPVQTTQEEDGCSCRFPEEEEGGCELRVKFSRSADAPAYQQGQNQLYNELNLGRREEYDVLDKRRGRDPEMGGKPRRKNPQEGLYNELQKDKMAEAYSEIGMKGERRRGKGHDGLYQGLSTATKDTYDALHMQALPPRSGATNFSLLKQAGDVEENPGPMLLLVTSLLLCELPHPAFLLIPRKVCNGIGIGEFKDSLSINATNIKHFKNCTSISGDLHILPVAFRGDSFTHTPPLDPQELDILKTVKEITGFLLIQAWPENRTDLHAFENLEIIRGRTKQHGQFSLAVVSLNITSLGLRSLKEISDGDVIISGNKNLCYANTINWKKLFGTSGQKTKIISNRGENSCKATGQVCHALCSPEGCWGPEPRDCVSCRNVSRGRECVDKCNLLEGEPREFVENSECIQCHPECLPQAMNITCTGRGPDNCIQCAHYIDGPHCVKTCPAGVMGENNTLVWKYADAGHVCHLCHPNCTYGCTGPGLEGCPTNGPKIPSIATGMVGALLLLLVVALGIGLFM

SEQ ID NO: 5088 - protein, 6 aa, synthetic construct
  REGION 1..6: note = Linker
GGGGSG

1-154. (canceled)

155. A polynucleotide comprising a nucleic acid sequence encoding a chimeric antigen receptor (CAR) comprising
(i) an antigen-binding domain that binds to an epitope on a tumor antigen expressed on a target cell;
(ii) a transmembrane domain;
(iii) an intracellular domain; and,
(iv) a CAR spacer located between the antigen-binding domain and the transmembrane domain comprising an amino acid sequence derived from a human immunoglobulin hinge and/or constant region or a functional fragment thereof,
wherein
(a) the CAR spacer is between about 150 amino acids and about 125 amino acids in length; and, the distance between the epitope and the surface of the target cell membrane is less than about 10 Å;
(b) the CAR spacer is between about 125 amino acids and about 100 amino acids in length; and, the distance between the epitope and the surface of the target cell membrane is less than about 10 Å;
(c) the CAR spacer is between about 100 amino acids and about 75 amino acids in length; and, the distance between the epitope and the surface of the target cell membrane is less than about 10 Å;
(d) the CAR spacer is between about 75 amino acids and about 36 amino acids in length; and, the distance between the epitope and the surface of the target cell membrane is less than about 15 Å;
(e) the CAR spacer is between about 35 amino acids and about 21 amino acids in length; and, the distance between the epitope and the surface of the target cell membrane is between about 15 Å and about 25 Å;
(f) the CAR spacer is between about 20 amino acids and about 16 amino acids in length; and, the distance between the epitope and the surface of the target cell membrane is between about 25 Å and about 35 Å;
(g) the CAR spacer is between about 15 amino acids and about 11 amino acids in length; and, the distance between the epitope and the surface of the target cell membrane is between about 35 Å and about 45 Å; or,
(h) the CAR spacer is between about 10 amino acids and about 5 amino acids in length; and, the distance between the epitope and the surface of the target cell membrane is more than about 45 Å.

156. The polynucleotide of claim 155, wherein
(a) the distance between the epitope and the surface of the target cell membrane is less than about 10 Å and the CAR spacer is 125, 126, 127, 128, 129, 130, 131, 132, 133, 134, 135, 136, 137, 138, 139, 140, 141, 142, 143, 144, 145, 146, 147, 148, 149 or 150 amino acids in length;
(b) the distance between the epitope and the surface of the target cell membrane is less than about 10 Å and the CAR spacer is 100, 101, 102, 103, 104, 105, 106, 107, 108, 109, 110, 111, 112, 113, 114, 115, 116, 117, 118, 119, 120, 121, 122, 123, 124 or 125 amino acids amino acids in length;
(c) the distance between the epitope and the surface of the target cell membrane is less than about 10 Å and the CAR spacer is 75, 76, 77, 78, 79, 80, 81, 82, 83, 84, 85, 86, 87, 88, 89, 90, 91, 92, 93, 94, 95, 96, 97, 98, 99 or 100 amino acids in length;
(d) the distance between the epitope and the surface of the target cell membrane is less than about 15 Å and the CAR spacer is 36, 37, 38, 39, 40, 41, 42, 43, 44, 45, 46, 47, 48, 49, 50, 51, 52, 53, 54, 55, 56, 57, 58, 59, 60, 61, 62, 63, 64, 65, 66, 67, 68, 69, 70, 71, 72, 73, 74 or 75 amino acids in length;
(e) the distance between the epitope and the surface of the target cell membrane is between about 15 Å and about 25 Å and the CAR spacer is 21, 22, 23, 24, 25, 26, 27, 28, 29, 30, 31, 32, 33, 34 or 35 amino acids in length;
(f) the distance between the epitope and the surface of the target cell membrane is between about 25 Å and about 35 Å and the CAR spacer is 16, 17, 18, 19 or 20 amino acids in length;
(g) the distance between the epitope and the surface of the target cell membrane is between about 35 Å and about 45 Å and the CAR spacer is 11, 12, 13, 14, or 15 amino acids in length; or,
(h) the distance between the epitope and the surface of the target cell membrane is more than about 45 Å and the CAR spacer is 5, 6, 7, 8, 9 or 10 amino acids in length.

157. The polynucleotide of claim 155, wherein the tumor antigen comprises ROR1, HER2, AFP, TRAC, TCRP, BCMA, CLL-1, CS1, CD38, CD19, TSHR, CD123, CD22, CD30, CD70, CD171, CD33, EGFRvIII, GD2, GD3, Tn Ag, PSMA, ROR2, GPC1, GPC2, FLT3, FAP, TAG72, CD44v6, CEA, EPCAM, B7H3, KIT, IL-13Ra2, mesothelin, IL-1 1Ra, PSCA, PRSS21, VEGFR2, LewisY, CD24, PDGFR-beta, SSEA-4, CD20, folate receptor alpha, ERBB2 (Her2/neu), MUC1, MUC16, EGFR, NCAM, prostase, PAP, ELF2M, Ephrin B2, IGF-I receptor, CAIX, LMP2, gplOO, bcr-abl, tyrosinase, EphA2, fucosyl GM1, sLe, GM3, TGS5, HMWMAA, o-acetyl-GD2, folate receptor beta, TEM1/CD248, TEM7R, CLDN6, GPRC5D, CXORF61, CD97, CD179a, ALK, polysialic acid, PLAC1, GloboH, NY-BR-1, UPK2, HAVCR1, ADRB3, PANX3, GPR20, LY6K, OR51E2, TARP, WTI, NY-ESO-1, LAGE-la, MAGE-Al, legumain, HPV E6, E7, MAGE Al, ETV6-AML, sperm protein 17, XAGE1, Tie 2, MAD-CT-1, MAD-CT-2, Fos-related antigen 1, p53, p53 mutant, prostein, surviving, telomerase, PCTA-1/Galectin 8, MelanA/MARTI, Ras mutant, hTERT, sarcoma translocation breakpoints, ML-IAP, ERG (TMPRSS2 ETS fusion gene), NA17, PAX3, androgen receptor, cyclin B1, MYCN, RhoC, TRP-2, CYP1B1, BORIS, SART3, PAX5, OY-TES1, LCK, AKAP-4, SSX2, RAGE-1, human telomerase reverse transcriptase, RU1, RU2, intestinal carboxyl esterase, mut hsp70-2, CD79a, CD79b, CD72, LAIR1, FCAR, LILRA2, CD300LF, CLEC12A, BST2, EMR2, LY75, GPC3, FCRL5, IGLL1, CD2, CD3F, CD4, CD5, CD7, the extracellular portion of the APRIL protein, and any combinations thereof.

158. The polynucleotide of claim 155, wherein the CAR spacer located between the antigen-binding domain and the transmembrane domain comprises an amino acid sequence derived from a human or mouse immunoglobulin hinge and/or constant region or a functional fragment thereof, wherein the immunoglobulin is selected from the group consisting of mouse IgG2, human IgG1, human IgG2, human IgG3, human IgA1, human IgA2, human IgD, human IgE, and human IgM.

159. The polynucleotide of claim 155, wherein the CAR spacer comprises an amino acid sequence having at least 70%, 75%, 80%, 85%, 90%, 95%, 97%, 99%, or 100% sequence identity to
(i) a mouse IgG2 sequence selected from the group consisting of SEQ ID NOS: 4830, 4831, and 4832;
(ii) a human IgG3 sequence selected from the group consisting of SEQ ID NOS: 4833, 4834, 4835, 4836, 4837, 4838, and 4841;
(iii) a human IgG1 sequence selected from the group consisting of SEQ ID NOS: 4839, 4840, and 4843;
(iv) a human IgG2 sequence of SEQ ID NO: 4842;
(v) a human IgG1 sequence selected from the group consisting of SEQ ID NOS: 4839, 4840, and 4843;
(vi) a human IgAQ1 sequence selected from the group consisting of SEQ ID NOS: 4844, 4845, 4846, and 4847;
(vii) a human IgA2 sequence selected from the group consisting of SEQ ID NOS: 4848, 4849, 4850, and 4851;
(viii) a human IgD sequence selected from the group consisting of SEQ ID NOS: 4852, 4853, 4854, and 4855;
(ix) a human IgE sequence of SEQ ID NO: 4856; or
(x) a human IgM sequence selected from the group consisting of SEQ ID NOS: 4857, 4848, and 4859.

160. The polynucleotide of claim 155, wherein the CAR spacer further comprises an N-terminal Glycine/Serine linker selected from the group consisting of the sequence GGGSG (SEQ ID NO: 4818) and the sequence GGGGSG (SEQ ID NO: 5088).

161. The polynucleotide of claim 155, wherein the antigen-binding domain comprises the six complementary determining regions (CDRs) derived from the R11 antibody, R12 antibody, or 2A2 antibody.

162. The polynucleotide of claim 155, wherein the antigen-binding domain comprises:
(i) VH CDR1 of SEQ ID NO: 4888; VH CDR2 of SEQ ID NO: 4889; and VH CDR3 of SEQ ID NO:
4890; and/or VL CDR1 of SEQ ID NO: 4892; VL CDR2 of SEQ ID NO: 4893; and VL CDR3 of SEQ ID NO: 4894;
(ii) VH CDR1 of SEQ ID NO: 4896; VH CDR2 of SEQ ID NO: 4897; and VH CDR23 of SEQ ID NO: 4898; and/or VL CDR1 of SEQ ID NO: 4900; VL CDR2 of SEQ ID NO: 4901; and VL CDR3 of SEQ ID NO: 4902; or,
(iii) VH CDR1 of SEQ ID NO: 4904; VH CDR2 of SEQ ID NO: 4905; and VH CDR23 of SEQ ID NO: 4906; and/or VL CDR1 of SEQ ID NO: 4908; VL CDR2 of SEQ ID NO: 4909; and VL CDR3 of SEQ ID NO: 4910.

163. The polynucleotide of claim 155, wherein the antigen-binding domain comprises a VH and a VL, and wherein:
(i) the VH comprises SEQ ID NO: 4887; or the VL comprises SEQ ID NO: 4891;
(ii) the VH comprises SEQ ID NO: 4895; or the VL comprises SEQ ID NO: 4899; or,
(iii) the VH comprises SEQ ID NO: 4903; or the VL comprises SEQ ID NO: 4907.

164. The polynucleotide of claim 155, wherein the CAR comprises an amino acid sequence set forth is SEQ ID NO: 5061, 5062, 5063, 5058, 5059, 5060, 5049, 5050, or 5051.

165. A vector comprising the polynucleotide of claim 155.

166. A composition comprising the polynucleotide of claim 155.

167. A CAR encoded by the polynucleotide of claim 155.

168. A cell genetically modified to express a CAR, comprising the polynucleotide of claim 155.

169. The cell of claim 168, which comprises a T cell, a natural killer (NK) cell, an natural killer T (NKT) cell, an ILC cell, a macrophage, or an antigen presenting cell.

170. A pharmaceutical composition comprising the cell of claim 168.

171. A culture medium comprising the cell of claim 168.

172. A method of treating cancer or providing an anti-tumor immunity in a subject in need thereof comprising administering to the subject an effective amount of a vector, composition, cell, or pharmaceutical composition comprising the polynucleotide of claim 155.

173. A method of preparing a population of cells for a therapy comprising transducing a population of cells isolated from a subject with a polynucleotide or vector comprising the polynucleotide of claim 155.

174. A method of generating a persisting population of genetically engineered cells in a subject with cancer, the method comprising administering to the subject a cell genetically engineered to express a CAR encoded by the polypeptide of claim 155.
